(19) United States
(12) Patent Application Publication
(10) Pub. No.: US 2025/0369054 A1
(43) Pub. Date: Dec. 4, 2025

(54) NOVEL RNA-BIOMARKERS FOR DIAGNOSIS OF PROSTATE CANCER

(71) Applicants: FRAUNHOFER-GESELLSCHAFT ZUR FÖRDERUNG DER ANGEWANDTEN FORSCHUNG E. V., München (DE); UNIVERSITÄT LEIPZIG, Leipzig (DE)

(72) Inventors: Kirstin REICHE, Leipzig (DE); Friedemann HORN, Leipzig (DE); Conny BLUMERT, Leipzig (DE); Tilo BUSCHMANN, Leipzig (DE); Sophie BARTSCH, Leipzig (DE); Catharina BERTRAM, Leipzig (DE); Manfred WIRTH, Dresden (DE); Susanne FÜSSEL, Dresden (DE); Michael FRÖHNER, Dresden (DE); Markus KREUZ, Leipzig (DE); Dominik OTTO, Leipzig (DE)

(21) Appl. No.: 19/108,115

(22) PCT Filed: Sep. 4, 2023
(86) PCT No.: PCT/EP2023/074132

§ 371 Date: Feb. 28, 2025

(30) Foreign Application Priority Data
Sep. 5, 2022 (EP) 22193923.4

(51) Int. Cl. C12Q 1/6886

(52) U.S. Cl. CPC C12Q 1/6886; C12Q 2600/158

(57) ABSTRACT

The present invention involves methods for the ex-vivo diagnosis of prostate cancer comprising the steps of i) providing a sample from a patient suspected of having prostate cancer and ii) analysing the expression level of at least one newly identified biomarker for prostate cancer in the sample, wherein, if the expression level of said biomarker is above a threshold value, the sample is designated as prostate cancer positive. Further, the invention involves stringent sample and method quality control criteria to ensure a reliable and specific method of diagnosing prostate cancer.

### FIELD OF THE INVENTION

[0001] The present invention is in the field of biology and chemistry. In particular, the invention is in the field of molecular biology. More particularly, the invention relates to the analysis of RNA transcripts. Most particularly, the invention is in the field of diagnosing prostate cancer.

### BACKGROUND OF THE INVENTION

[0002] Prostate cancer (PCa) is the most common malignant disease in men and third leading cause of cancer-related deaths in the Western world. In 2020, the annual number of newly diagnosed PCa cases was second leading in Western Europe. Despite widespread screening for prostate cancer and major advances in the treatment of metastatic disease, PCa remains in 2020 the third most common cause of cancer death for men in Europe.

[0003] Currently, testing of prostate-specific antigen (PSA) serum levels and the digital rectal examination represent the two major screening methods. Patients showing abnormal results usually are advised to have a prostate biopsy performed. This has however significant consequences. The lack of specificity of PSA screening which produces high numbers of false positives causes unnecessary prostate biopsies performed annually on millions of men worldwide (overdiagnosis). In addition, taking biopsies carries a substantial risk for infectious complications. Therefore, there is an urgent need for a more sensitive and specific diagnostic assay for early prostate cancer diagnosis to improve prostate cancer screening and to avoid the high numbers of unnecessarily taken prostate biopsies. The present invention addresses this problem by providing a set of biomarkers for the screening and diagnosis of prostate cancer.

### Prostate-Specific Antigen

[0004] Currently, the most common screening assay for PCa is the measurement of blood serum concentrations of PSA. However, there is no single threshold value for PSA that can reliably distinguish patients with PCa from those without. The lack of specificity of PSA testing is illustrated by a high false-positive rate of up to 75% (Duffy, 2020). The areas under the ROC curve (AUC) value for the PSA test to discriminate PCa from no cancer was reported as 0.678 (Thompson, 2005). Although there has been significant research into improving the performance of PSA itself, including measuring free PSA or truncated forms of PSA (Jansen, 2009), all the problems are unresolvable. Based on this evidence, the US Preventative Services Task Force has recommended against PSA-based prostate cancer screening on the basis of high false-positive rates and the risks associated with biopsies and over-treatment (Moyer, 2012).

[0005] PSA-derived biomarkers include the Prostate Health Index (PHI, Jansen, 2010) and the four Kallikrein panel (4K Score, Vickers, 2008). Both combine information of serum levels of different PSA protein variants, the latter one additionally measures kallikrein 2. Related studies primarily focus on high-grade PCa (GS≥7) to predict aggressive tumours (Duffy, 2020).

### Prostate Cancer Antigen 3

[0006] Prostate cancer antigen 3 (PCA3), a noncoding RNA with expression confined to the prostate, is overexpressed in 95% of PCa samples compared with normal or benign hyperplastic prostate tissue (Salagierski, 2012). The Progensa PCA3 assay (Gen Probe Inc., San Diego, CA, USA) is a commercially available diagnostic test that quantitatively detects PCA3 in urine and prostatic fluid. A PCA3 score >35 in the urine has been determined to exhibit an average sensitivity and specificity of 66% and 76%, respectively, for the diagnosis of PCa (Van Gils, 2007), and an AUC value of 0.693 was reported (Aubin, 2010). Elevated PCA3 scores have also been demonstrated to increase the probability of a positive repeat biopsy in men with one or two prior negative biopsy results (Haese, 2008). Although the specificity and sensitivity values of the PCA3 assays surpass the ones of PSA serum testing slightly, they are still unsatisfactory and hence, in the practical clinical use, the PCA3 test has not reached a wide acceptance.

### Gleason Score

[0007] The so-called Gleason grading system is used in combination with other parameters to predict PCa prognosis and guide therapy. The Gleason score is assigned by pathologists on the basis of microscopic features of prostate biopsies and reflects the differentiation status of the prostate tumour cells observed in the biopsy material (Gleason, 1977). Prostate cancers with low Gleason scores have better prognosis and the majority of them may not require treatment and should be monitored with active surveillance. However, the informative value is limited and the pinpointing of tumours that are aggressive and lethal despite having low Gleason scores remains a clinical challenge (Irshad, 2013).

### Novel Biomarkers

[0008] The TMPRSS2:ERG gene fusion is the most common genetic aberration in PCa, found in approximately 40% to 70% of patients. A sensitive TMPRSS2-ERG assay is available for clinical use but is unable to cover the TMPRSS2:ERG-negative PCa cases. Furthermore, a correlation of TMPRSS2:ERG with prognosis is controversial. In addition, a number of novel biomarkers have been proposed in the recent years as candidates for the use in diagnosis or prognosis of PCa but have not been introduced into clinical routine. This includes genetic as well as RNA biomarkers. A recent study to externally confirm the accuracy of the Select MDx test showed decreased performance than previously reported (Lendinez-Cano, 2021). The Mi-Prostate Score as well as ExoDx use the information of expression levels of the prostate-specific, non-coding RNA PCA3 and the fusion transcript TMPRSS2:ERG. Whereas, SelectMDx represents a qPCR-based assay measuring DLX1 and HOXC6 mRNA levels for detection of PCa. The three tests outlined emphasize their good clinical performance in predicting high-grade PCa (GS≥7). In general, the inclusion of clinical information like age, findings of digital rectal examination (DRE) and previous biopsies further improve test performance (Cucchiara, 2017).

### SUMMARY

[0009] The strong focus on high-grade tumours of the tests described above improves test performance and may exclude low-risk PCa (equated to GS 6) for biopsy. However, it bears the risk to overlook at least some aggressive tumours. GS 6 PCa usually is described as non-threatening but it still is cancer and can progress to GS 7 or higher and metastasize. In this case different therapeutic approaches are required. GS 6 PCa patients are usually considered for active surveillance. It has been shown that more men on active surveillance showed disease progression than on radical therapy strategies. A test for early detection of PCa, prior to biopsy, shall identify patients who profit from further diagnosis, hence, exclusion of GS 6 tumours for test development may turn the test insensitive to an elevated risk subgroup of GS 6 PCa patients. It is debatable whether GS 6 PCa patients should be excluded for further invasive diagnosis a priori.

[0010] The aim of the current study was to identify new RNA biomarkers for early diagnosis of PCa (GS≥6) in order to reduce unnecessary biopsies. This study did also not exclude patients with GS=6, thus the method of the invention may also detect early stages of PCa. In particular the method of the invention is aimed at a diagnostic differentiation of PCa tumours from BPH (benign prostatic hyperplasia). Previously published application WO 2015/082418 A1 also presents newly identified biomarkers for diagnosis of PCa, however the present application provides a superior method of diagnosis with improved reliability using different models and selections of biomarkers.

### BRIEF DESCRIPTION OF THE INVENTION

[0011] Transcripts differentially expressed in tumour and control tissues were identified by Next Generation Sequencing of 64 samples of prostate cancer patients and controls; and validated by microarray and qRT-PCR analyses of 203 and 338 samples, respectively. From these samples a selection of potential RNA biomarkers was identified, which are suitable for use in the diagnosis of prostate cancer. Evaluation and optimization of the identified biomarkers was used to develop a diagnostic method which represents an improved and more reliable diagnosis of PCa. Essentially this diagnostic method includes stringent quality evaluation of patient samples and subsequent normalization of the RNA biomarkers to a selected and optimized set of reference RNAs. The normalized expression data of the RNA biomarkers is then analysed by an algorithm to determine the diagnosis.

[0012] The invention relates to a method for the diagnosis of prostate cancer comprising the steps of analysing the expression level of at least a nucleic acid selected from the group of SEQ ID NO: 2 and 20, wherein, if at least one of said nucleic acids is present and/or the expression level of at least one of said nucleic acids is above a threshold value, the sample is designated as prostate cancer positive.

[0013] In a preferred embodiment, the invention relates to a method for the diagnosis of prostate cancer comprising the steps of analysing the expression level of at least a nucleic acid according to SEQ ID NO: 2, SEQ ID NO: 19-20 and SEQ ID NO: 35-37 in a sample from a patient, wherein, if the expression level of said nucleic acid is above a threshold value, the sample is designated as prostate cancer positive.

[0014] In an alternative and equally preferred embodiment of the invention, the invention relates to a method for the diagnosis of prostate cancer comprising the steps of analysing the expression level of at least a nucleic acid according to SEQ ID NO: 1-3, SEQ ID NO: 20-34 and SEQ ID NO: 38-50 in a sample from a patient, wherein, if the expression level of said nucleic acid is above a threshold value, the sample is designated as prostate cancer positive.

[0015] In one embodiment, the invention relates to a nucleic acid that hybridizes under stringent conditions to one of the nucleic acids with SEQ ID NO: 1-3 or SEQ ID NO: 19-50, or any part thereof, or a nucleic acid that shares preferably at 85%, 90%, 91%, 92%, 93%, 94%, 95%, 96%, 97%, 98% or 99% sequence identity with a nucleic acid according to any one of the nucleic acids according to SEQ ID NO: 1-3 or SEQ ID NO: 19-50.

[0016] The invention also relates to the use of a nucleic acid that hybridizes under stringent conditions to one of the nucleic acids with SEQ ID NO: 1-3 or SEQ ID NO: 19-50, or any part thereof, or a nucleic acid that shares preferably at 85%, 90%, 91%, 92%, 93%, 94%, 95%, 96%, 97%, 98% or 99% sequence identity with a nucleic acid according to any one of the nucleic acids according to SEQ ID NO: 1-3 or SEQ ID NO: 19-50 for the diagnosis of prostate cancer.

[0017] The invention relates to a probe or primer, wherein the probe or primer is specific for a sequence of the group of SEQ ID NO: 1-131, preferably the specific sequences of the probe or primer are selected from the group comprising SEQ ID NO: 136-174.

[0018] The invention relates to the use of a nucleic acid with a sequence from the group of SEQ ID NO: 136-174 for the diagnosis of prostate cancer.

[0019] The invention relates to a nucleic acid with a sequence from the group of SEQ ID NO: 1-131, or the reverse complement thereof, or a nucleic acid that shares preferably at least 85%, 90%, 91%, 92%, 93%, 94%, 95%, 96%, 97%, 98% or 99% sequence identity with a nucleic acid according to any one of the nucleic acids according to SEQ ID NO: 1-131.

[0020] The invention also relates to a kit for the diagnosis of prostate cancer comprising a nucleic acid that hybridizes under stringent conditions to the nucleic acid according to SEQ ID NO: 1-131, or a nucleic acid that shares preferably at least 85%, 90%, 91%, 92%, 93%, 94%, 95%, 96%, 97%, 98% or 99% sequence identity with a nucleic acid according to any one of the nucleic acids according to SEQ ID NO: 1-131; and reagents for nucleic acid amplification and/or quantification and/or detection.

### Definitions

[0021] The following definitions are provided for specific terms, which are used in the application text.

[0022] Unless otherwise defined, all technical and scientific terms used herein have the same meaning as commonly understood by one skilled in the art to which this technology belongs. Although all methods and materials similar or equivalent to those described herein may be used in practice or in testing the present technology, the preferred methods, devices and materials are now described.

[0023] Where an indefinite or a definite article is used when referring to a singular noun such as “a” or “an” or “the”, this includes a plural form of that noun unless specifically stated. Vice versa, when the plural form of a noun is used it refers also to the singular form. For example, when biomarkers are mentioned, this is also to be understood as a single biomarker.

[0024] As used herein, “nucleic acid(s)” or “nucleic acid molecule” generally refers to any ribonucleic acid or deoxyribonucleic acid, which may be unmodified or modified. “Nucleic acids” include, without limitation, single- and double-stranded nucleic acids. As used herein, the term “nucleic acid(s)” also includes nucleic acids as described above that contain one or more modified bases. Thus, a nucleic acid with one or several backbone modifications for stability or for other reasons is a “nucleic acid”. The term “nucleic acids” as it is used herein encompasses such chemically, enzymatically or metabolically modified forms of nucleic acids, as well as the chemical forms of nucleic acids characteristic of viruses and cells, including for example, simple and complex cells.

[0025] The term “transcript” relates to a nucleic acid produced by making a copy of a template nucleic acid. Included in this definition is the nucleic acid obtained through transcription by a polymerase of a template nucleic acid, for example a locus, to produce the new nucleic acid with a sequence complementary to the template. The term transcript also includes any nucleic acid further processed after transcription. Such further processing includes, but is not limited to, splicing, polyadenylation, editing, partial digestion, ligation, and labelling. The term also encompasses nucleic acids derived from the transcript through for example further transcription, reverse transcription, amplification or elongation. The transcript can correspond to any portion of the template nucleic acid, preferably to at least 20 nucleotides. The transcript also has a sequence identity with the template nucleotide or part of the template nucleotide, or the reverse complement of the template nucleic acid of at least 90%, preferably at least 95% and most preferably at least 99%.

[0026] The terms “locus (hg38)” and short “hg38” are used to provide references to specific genetic loci in the hg38 assembly of the human genome. The references are denoted in the format of e.g.: Chr2: 1,550,437-1,629,191” which relates to a sequence interval on the human chromosome 2 within the genome assembly.

[0027] “Sample molecules” or “individual sample templates” as used herein refers to any kind of nucleic acid molecules contained in a sample to by analysed, such as single-stranded or double-stranded DNA and/or RNA.

[0028] “Biomarker” within the present invention refers to any gene, gene transcript, gene transcript variant or non-coding genomic sequence which are predictive for diagnosis of PCa.

[0029] The terms “level” or “expression level” in the context of the present invention relate to the level at which a biomarker is present in a sample from a patient. The expression level of a biomarker is generally measured by comparing its expression level to the expression level of one or several reference or housekeeping genes in a sample for normalisation. The sample from the patient is designated as prostate cancer positive if the expression level of the biomarker exceeds the expression level of the same biomarker in an appropriate control (for example a healthy tissue) by a set threshold value. Expression levels are further calibrated for inter-run comparison using reference genes measured in calibrator samples.

[0030] The term, “analysing a sample for the presence and/or level of nucleic acids” or “specifically estimate levels of nucleic acids”, as used herein, relates to the means and methods useful for assessing and quantifying the levels of nucleic acids. One useful method is for instance quantitative reverse transcription PCR. Likewise, the level of RNA can also be analysed for example by northern blot, next generation sequencing or after amplification by using spectrometric techniques that include measuring the absorbance at 260 and 280 nm.

[0031] The “amplification” of the individual sample templates refers to any kind of nucleic acid amplification method which results in the generation of multiples of the original template.

[0032] Analysis or examination herein refers to identifying whether or not amplification has taken place, identifying whether or not the target sequence lies between the primer regions and optionally, has the right length, identifying the amount of amplification product with a correct target sequence. Preferably in the method of the invention precise quantification of the amplification product is desired.

[0033] As used herein, the term “amplified”, when applied to a nucleic acid sequence, refers to a process whereby one or more copies of a particular nucleic acid sequence is generated from a nucleic acid template sequence, preferably by the method of polymerase chain reaction (PCR). Other methods of amplification include, but are not limited to, ligase chain reaction (LCR), polynucleotide-specific based amplification (NSBA), loop-mediated isothermal amplification (LAMP), quantitative reverse transcription real-time PCR (qRT-PCR), quantitative (real-time) PCR (qPCR), droplet digital PCR, digital PCR, or any other amplification method known in the art.

[0034] The term “correlating”, as used herein in reference to the use of diagnostic and prognostic marker(s), refers to comparing the presence or amount of the marker(s) in a sample from a patient to its presence or expression level in a sample from a person known to suffer from or at risk of suffering from a given condition. A marker expression level in a patient sample can be compared to a level known to be associated with a specific diagnosis.

[0035] As used herein, the terms “diagnosis” or “diagnostic” refer to the identification of the disease, in this case prostate cancer, at any stage of its development, and also includes the determination of predisposition of a subject to develop the disease.

[0036] The “labeling” of the DNA or RNA strands can be realized by associating or incorporating any kind of marker detectable by conventional imaging techniques, e.g. a fluorescent marker.

[0037] As used herein, the term “fluorescent dye” refers to any chemical that absorbs light energy of a specific wavelength and re-emits light at a different wavelength.

[0038] Application of a fluorescence dye for target detection implies either use of intercalating dyes in a PCR reaction to detect formation of double-stranded DNA molecules, or labelling primers or probes with suitable fluorophore molecules to observe presence of formation of nucleic acid molecules with complementary target sequences in dependence on the detected fluorescence signals of the fluorophore molecules. By using different fluorophores with distinct emission and excitation spectra it is possible to combine more than one detection system into one PCR reaction (multiplex PCR) and to separately detect the fluorescence signals. Potential labelling molecules include but are not limited to fluorescence dye or chemiluminescence dye in particular a dye of the cyanine type. In the context of the present invention, fluorescence based assays comprise the use of dyes, which may for instance be selected from the group comprising FAM (5- or 6-carboxyfluorescein), VIC, NED, Fluorescein, Fluoresceinisothiocyanate (FITC), IRD-700/800, Cyanine dyes, such as CY3, CY5, CY3.5, CY5.5, Cy7, Xanthen, 6-Carboxy-2′,4′,7′,4,7-hexachlorofluorescein (HEX), TET, 6-Carboxy-4′,5′-dichloro-2′,7′-dimethodyfluorescein (JOE), N,N,N′,N′-Tetramethyl-6-carboxyrhodamine (TAMRA), 6-Carboxy-X-rhodamine (ROX), 5-Carboxyrhodamine-6G (R6G5), 6-carboxyrhodamine-6G (RG6), Rhodamine, Rhodamine Green, Rhodamine Red, Rhodamine 110, BODIPY dyes, such as BODIPY TMR, Oregon Green, Coumarines such as Umbelliferone, Benzimides, such as Hoechst 33258; Phenanthridines, such as Texas Red, Yakima Yellow, Alexa Fluor, PET, Ethidiumbromide, Acridinium dyes, Carbazol dyes, Phenoxazine dyes, Porphyrine dyes, Polymethin dyes, and the like. In the context of the present invention, chemiluminescence based assays comprise the use of dyes, based on the physical principles described for chemiluminescent materials in Kirk-Othmer, Encyclopedia of chemical technology, 4th ed., executive editor, J. I. Kroschwitz; editor, M. Howe-Grant, John Wiley & Sons, 1993, vol. 15, p. 518-562, incorporated herein by reference, including citations on pages 551-562. Preferred chemiluminescent dyes are acridiniumesters.

[0039] As used herein, “isolated” when used in reference to a nucleic acid means that a naturally occurring sequence has been removed from its normal cellular (e.g. chromosomal) environment or is synthesised in a non-natural environment (e.g. artificially synthesised). Thus, an “isolated” sequence may be in a cell-free solution or placed in a different cellular environment.

[0040] As used herein, a “kit” is a packaged combination optionally including instructions for use of the combination and/or other reactions and components for such use. If the kit contains nucleic acids, the kit may also comprise synthetic or non-natural variants of said nucleic acids. A synthetic or non-natural nucleic acid is to be understood as a nucleic acid comprising any chemical, biochemical or biological modification, such that the nucleic acid does not appear in nature in this form. Such modifications include, but are not limited to, labelling with a fluorescent dye or a quencher moiety, a biotin tag, as well as modification(s) in the backbone of a nucleic acid, or any other modification that distinguishes the nucleic acid from its natural counterpart. The same applies also to other natural compounds such as proteins, lipids and the like.

[0041] The term “patient” as used herein refers to a living human or non-human organism that is receiving medical care or that should receive medical care due to a disease, or is suspected of having a disease. This includes persons with no defined illness who are being investigated for signs of pathology. Thus the methods and assays described herein are applicable to both, human and veterinary disease.

[0042] The term “primer” as used herein, refers to an nucleic acid, whether occurring naturally as in a purified restriction digest or produced synthetically, which is capable of acting as a point of initiation of synthesis when placed under conditions in which synthesis of a primer extension product, which is complementary to a nucleic acid strand, is induced, i.e., in the presence of nucleotides and an inducing agent such as a DNA polymerase and at a suitable temperature and pH. The primer may be either single-stranded or double-stranded and must be sufficiently long to prime the synthesis of the desired extension product in the presence of the inducing agent. The exact length of the primer will depend upon many factors, including temperature, source of primer and the method used. Preferably, primers have a length of from about 15-100 bases, more preferably about 20-50, most preferably about 20-40 bases. The factors involved in determining the appropriate length of primer are readily known to one of ordinary skill in the art. Optionally, the primer can be a synthetic element, in the sense that it comprises a chemical, biochemical or biological modification. Such modifications include, but are not limited to, labelling with a fluorescent dye or a quencher moiety, or a modification in the backbone of a nucleic acid, or any other modification that distinguishes the primer from its natural nucleic acid counterpart.

[0043] The term “probe” refers to any element that can be used to specifically detect a biological entity, such as a nucleic acid, a protein or a lipid. Besides the portion of the probe that allows it to specifically bind to the biological entity, the probe also comprises at least one modification that allows its detection in an assay. Such modifications include, but are not limited to labels such as fluorescent dyes, quenchers, a specifically introduced radioactive element, or a biotin tag. The probe can also comprise a modification in its structure, such as a locked nucleic acid.

[0044] The term “sample” as used herein refers to a sample of bodily fluid or tissue obtained for the purpose of diagnosis, prognosis, or evaluation of a subject of interest, such as a patient. In addition, one of skill in the art would realize that some test samples would be more readily analysed following a fractionation or purification procedure, for example, separation of whole blood into serum or plasma components.

[0045] Thus, in a preferred embodiment of the invention the sample is selected from the group comprising prostate tissue, biopsy material, lymph nodes, urine, ejaculate, blood, blood serum, blood plasma, circulating tumour cells in blood or lymph, any tissue suspected of containing metastases as well as any source that may contain prostate tumour cells or parts thereof, including vesicles like exosomes, micro vesicles, and others as well as free or protein-bound RNA molecules derived from prostate tumour cells. Preferably, the sample is a blood sample, most preferably a serum sample or a plasma sample. Importantly, urine (particularly after digital rectal examination) and ejaculate belong to the most preferable samples. Tissue samples may also be biopsy material or tissue samples obtained during surgery. The samples of the method of the invention are provided from a patient by suitable means of extraction, hence the samples are ex-vivo samples, i.e., samples which are removed from the patient. Subsequent analyses of the samples are performed by the in-vitro diagnostic method of the invention.

[0046] The term “area under the curve (AUC)” as used herein describes the area under the curve of a receiver operating characteristic (ROC) or ROC curve. The AUC relates to how specific and sensitive a biomarker is. A perfect marker (AUC=1.0) would yield a point in the upper left corner or coordinate (0,1) of the ROC space, representing 100% sensitivity (no false negatives) and 100% specificity (no false positives).

[0047] The term “p-value” relate to the probability of obtaining the observed sample results (or a more extreme result) when the null hypothesis is actually true, i.e. there are no differences between means for groups. The smaller the p-value, the higher the likelihood that the alternative hypothesis explains the observed results better than the null hypothesis.

[0048] The term “adjusted p-value” refers to p-values which have been adjusted for multiple comparisons according to Benjamini & Hochberg. The method applied is detailed in the experimental section.

### BRIEF DESCRIPTION OF THE FIGURES

[0049] FIG. 1: Processed cohorts for the development of ProstaCheck

[0050] FIG. 2: Box plot of RNA-seq data for transcript PCA3. Results from RNA sequencing of the retrospective PCa cohort comprising 8 prostate tissue samples from benign prostate hyperplasia as a control (C), 8 PCa tumour samples each of groups V (very low risk; Gleason score <7, pN0), L (low risk; Gleason score=7, pN0), and M (medium risk; Gleason score <=7, pN+), as well as 16 pairs of tumour and tumour-free tissue samples from group H (high risk; Gleason score >7).

[0051] FIG. 3: Expression in transcripts per million (TPM) of known diagnostic markers (PCA3, HOXC6, DLX1) compared to genes of the ProstaCheck test in urinary sediment (RNA-seq of 6 BPH and 5 PCa urinary sediments). Genes included in ProstaCheck depict on average a higher expression in urinary sediments than known markers.

### DETAILED DESCRIPTION OF THE INVENTION

[0052] The invention describes a method of diagnosis of prostate cancer. This method comprises analysing a sample taken from a patient and specifically determining the level of a biomarker or a combination of biomarkers in said patient sample. The result is then correlated to a threshold value and in the case where it is above that threshold value, said patient sample is designated as prostate cancer positive. Both the calculated score of the biomarker or biomarkers and the threshold value are obtained according to a machine-learning model.

[0053] The experimental data of this invention show an impressive sensitivity and specificity of the newly identified biomarkers (ProstaCheck; including 2 distinct assay models), which clearly outperform current assays on the market as seen by the increased AUC-value for the ProstaCheck models (Progensa PCA3, SelectMDx; see Table 1). FIG. 3 also presents a comparison of the newly identified biomarkers in comparison to commercially available SelectMDx and PCA3 assays, this figure also clearly indicated that the newly identified biomarkers are superior to the state of the art assays.

[0054] Diagnostic assays based on these new biomarkers therefore decrease the high false-positive rates of current assays and thereby help to avoid unnecessary invasive prostate biopsies. In addition, the method of the invention does not exclude men with GS=6, which were also included in the experimental data sets, thus enabling early diagnosis of prostate cancer by the method of the invention. Further, the method of the invention in particular includes criteria for stringent assessment of sample quality prior to application of the diagnostic assay and necessary normalization and calibration procedures for the detected biomarkers. Sample quality assessments, normalization and calibration are significant elements of the method of the invention, which ensures reliable and reproducible results.

TABLE 1
Direct comparison of ProstaCheck with state of
the art PCa assays Progensa PCA3 and SelectMDx
in urinary sediment samples using RT-qPCR

| | | Specificity at | |
|---|---|---|---|
| Method | AUC [95% CI] | 90% sensitivity | Number of markers |
| ProstaCheck | 0.817 [0.73-0.91] | 0.512 | 4 biomarkers |
| Model 1 | | | 5 reference markers |
| ProstaCheck | 0.829 [0.74-0.92] | 0.605 | 6 biomarkers |
| Model 2 | | | 5 reference markers |
| Progensa | 0.778 [0.70-0.86] | 0.467 | 1 biomarker |
| PCA3* | | | 1 reference marker |
| SelectMDx** | 0.76 | — | 2 biomarkers |
| | | | 1 reference marker |

*AUCs assessed at same patients in independent validation cohort (n = 87).
**AUC taken from Cui et al. “Evaluation of prostate cancer antigen 3 for detecting prostate cancer: a systematic review and meta-analysis”, Scientific Reports, May 2016

[0055] Apart from prostate cells, other cells may be present in urine or urinary sediment samples. To ensure that the biomarker assay of invention is not negatively affected by the presence of varying amounts of non-prostate cells the detected expression of promising biomarker candidate genes was correlated with expression of cell-specific reference genes. Typically urine or urinary sediment samples may contain leukocytes, kidney cells or bladder cells apart from cells of the prostate. Thus cell-specific reference genes for these cell types were selected, i.e. CD45 (leukocytes), UMOD (kidney cells), NPHS2 (kidney cells) and UPK2 (bladder cells). Biomarker candidates were only further considered if their expression did not correlate with expression of the mentioned cell-specific reference genes. Thus, the biomarkers of the present invention represent expression within prostate cells.

[0056] The term “urinary sediment”, refers to cells, cell debris and other sedimented material obtained by centrifugation of urine.

[0057] The combination of biomarkers and the calculation of threshold values as well as the calculation of sample analysis for diagnosis is achieved by a multivariate statistical model, which is obtained by a machine learning approach using training set samples of different PCa stages in comparison to BPH (benign prostatic hyperplasia). The newly identified biomarkers of the invention were found to be located in the genomic regions of the following genes: CPNE4 (biomarkers: PCaD2 [SEQ ID NO: 1]; PCaD4 [SEQ ID NO: 2]; PCaD52 [SEQ ID NO: 21-34]), TAPIR novel ncRNA (biomarker PCaD11 [SEQ ID NO: 3]), HOXB13 (biomarker PCaD42 [SEQ ID NO: 19]), PCAT14 (biomarker PCaD50 [SEQ ID NO: 20]), MSMB (biomarker PCaD54 [SEQ ID NO: 35-37]) and FOLH1 (biomarker PCaD58 [SEQ ID NO: 38-50]). Some of the listed biomarkers are situated in exons of known transcript variants of their respective genes, other are located within introns according to current annotation and therefore may relate to either new exons of yet unknown transcript variants or novel genes encoding for non-coding RNA. As reference previously described and commonly applied PCa biomarker PCA3 was also measured (biomarker PCaD30 [SEQ ID NO: 132-135]) by either custom designed primers or by commercially available Progensa PCA3 test. Table 2 provides an overview over the newly identified biomarkers for diagnosis of prostate cancer as well as a statistical evaluation of these biomarkers. The performance of these biomarkers is shown in table 2 and in FIG. 3.

[0058] These biomarkers were identified within the “discovery cohort” (see FIG. 1” using negative binominal log-linear models which were fitted to the observed data for each transcript or gene and regression coefficients were identified by a likelihood ratio test. As indicated in table 1 the identified new biomarkers were combined into diagnostic assay within two different logical models. These models were obtained by machine-learning. The scheme for identification of biomarkers, evaluation, validation and machine-learning is shown in FIG. 1. These models are logistic regression models which were fitted to the observed data for each biomarker and to receive regression coefficients. The first logical model combines biomarkers PCaD4, PCaD42, PCaD50 and PCaD54. The regression coefficients of these biomarkers in this model are: −0.03104, 0.04972, −0.13662 and −0.14546, respectively. The second logical model combines biomarkers PCaD2, PCaD4, PCaD11, PCaD50, PCaD52 and PCaD58. In a preferred form of the second logical model PCaD2 represents a combination of the markers measuring regions of CPNE4 gene (PCaD2, PCaD4, and PCaD52). It represents the minimum measured c_{q}-value after normalization and calibration of either PCaD2, PCaD4 or PCaD52, i.e. the highest observed expression level of these markers in a patient. The regression coefficients of these biomarkers in this model are: −0.06262, −0.01419, −0.03030, −0.05290, −0.03138 and −0.04455, respectively. Thus, both models contain PCaD4 and PCaD50, these two biomarkers represent an essential minimal component of both models. Further, these biomarkers may also as an alternative embodiment of the invention be combined on their own into a further model. However, inclusion of the additional biomarkers of the two described models improves the predictive value of the diagnostic assays.

[0059] The essential minimal component biomarkers of both models, i.e., PCaD4 and PCaD50, were also statistically analysed in combination with each other excluding any further markers of either model of the invention. This means that the data for the analysis of the combination of PCaD4 and PCaD50 were treated as the data of each model of the invention including the quality controls of the invention and normalization using the reference biomarkers of the invention. Subsequently a regression model is calculated using the training sets as shown in FIG. 1. Finally, the combination of PCaD4 and PCaD50 is tested in the validation cohort as for models 1 and 2 to determine the test parameters of the combination of PCaD4 and PCaD50 in comparison to prior art assays. The parameters show that there already is predictive and diagnostic benefit for the combination of PCaD4 and PCaD50 over the prior art assays.

[0060] All applied models further involve the use of reference biomarkers. These reference biomarkers are used for quality control of the samples as well as for normalization of the biomarker measurements. Within the assay models of the invention the following reference markers are used: KLK2 (biomarker PCaD91 [SEQ ID NO: 51-73]), KLK3 (biomarker PCaD32 [SEQ ID NO: 4-18]), EMC7 (biomarker PCaD92 [SEQ ID NO: 74-77]), RAB7A (biomarker PCaD93 [SEQ ID NO: 78-95]) and VCP (biomarker PCaD94 [SEQ ID NO: 96-131]).

[0061] Thus, the invention relates to a group of nucleic acids, the sequences of these nucleic acids comprise SEQ ID NOs 1 to 131. The relevant characteristics of these sequences are listed below in table 2 with further information regarding statistical analysis of individual biomarkers. The sequences are provided separately in the sequence listing. These sequences represent the selected biomarkers and selected reference markers (reference genes) of the present diagnostic method. Performing the present diagnostic method involves detection of at least one of the listed biomarkers and at least one of the listed reference markers and using the detected expression levels to determine the patient's diagnosis regarding PCa.

TABLE 2
List of biomarkers and reference genes: Each biomarker and reference gene is listed together with the gene annotations
and with statistical evaluation of each biomarkers. For several biomarkers and reference genes multiple transcript variants
are known. Each transcript variant corresponds to a SEQ ID NO which are listed for each biomarker and reference gene,
sequences and Ensembl Transcript IDs for each SEQ ID NO are presented in the sequence listing and in table 6.

| | | | | | | | | | p-value |
|---|---|---|---|---|---|---|---|---|---|
| | | | Ensembl | | | PPV | NGV | AUC | (U-test) |
| Marker label | Gene | | Gene ID | | Bio- | in | in | in | in |
| (SEQ ID NO) | symbol | Description | (Gencode V41) | Type* | type** | IVC*** | IVC*** | IVC*** | IVC*** |
| PCaD2 | CPNE4 | Copine 4 | ENSG00000196353 | intron | non | 0.775 | 0.75 | 0.76 | 0.0000247 |
| (SEQ ID NO: 1) | | (synonyms: | | | coding | | | | |
| | | COPN4, CPN4) | | | | | | | |
| | | Biomarker | | | | | | | |
| PCaD4 | CPNE4 | Copine 4 | ENSG00000196353 | intron | non | 0.698 | 0.818 | 0.789 | 0.00000171 |
| (SEQ ID NO: 2) | | (synonyms: | | | coding | | | | |
| | | COPN4, CPN4) | | | | | | | |
| | | Biomarker | | | | | | | |
| PCaD11 | TAPIR | Novel ncRNA | ENSG00000203635 | 1 transcript | non | 0.806 | 0.706 | 0.792 | 0.0000011 |
| (SEQ ID NO: 3) | | Biomarker | | variant | coding | | | | |
| PCaD32 | KLK3 | Kallikrein related | ENSG00000142515 | 15 transcript | coding | — | — | — | — |
| (SEQ ID NO: 4-18) | | peptidase 3 | | variants | | | | | |
| | | (synonyms: APS, | | | | | | | |
| | | KLK2A1, PSA, hK3) | | | | | | | |
| | | Reference marker | | | | | | | |
| PCaD42 | HOXB13 | Homeobox B13 | ENSG00000159184 | 1 transcript | coding | 0.794 | 0.679 | 0.762 | 0.0000157 |
| (SEQ ID NO: 19) | | (synonym: | | variant | | | | | |
| | | HPC9, PSGD) | | | | | | | |
| | | Biomarker | | | | | | | |
| PCaD50 | PCAT14 | Prostate cancer | ENSG00000280623 | intron | non | 0.81 | 0.762 | 0.807 | 0.000000455 |
| (SEQ ID NO: 20) | | associated | | | coding | | | | |
| | | transcript 14 | | | | | | | |
| | | Biomarker | | | | | | | |
| PCaD52 | CPNE4 | Copine 4 | ENSG00000196353 | 14 transcript | coding | 0.789 | 0.717 | 0.801 | 0.00000078 |
| (SEQ ID NO: 21-34) | | (synonyms: | | variants | | | | | |
| | | COPN4, CPN4) | | | | | | | |
| | | Biomarker | | | | | | | |
| PCaD54 | MSMB | Microseminoprotein | ENSG00000263639 | 3 transcript | coding | 0.757 | 0.68 | 0.758 | 0.0000202 |
| (SEQ ID NO: 35-37) | | beta | | variants | | | | | |
| | | (synonyms: HPC13, | | | | | | | |
| | | IGBF, MSP, MSPB, | | | | | | | |
| | | PN44, PRPS, PSP, | | | | | | | |
| | | PSP-94, PSP57, | | | | | | | |
| | | PSP94) | | | | | | | |
| | | Biomarker | | | | | | | |
| PCaD58 | FOLH1 | Folate hydrolase 1 | ENSG00000086205 | 13 transcript | coding | 0.756 | 0.717 | 0.795 | 0.00000082 |
| (SEQ ID NO: 38-50) | | (synonyms: FGCP, | | variants | | | | | |
| | | FOLH, GCP2, GCPII, | | | | | | | |
| | | NAALAD1, PSM, | | | | | | | |
| | | PSMA, mGCP) | | | | | | | |
| | | Biomarker | | | | | | | |
| PCaD91 | KLK2 | Kallikrein related | ENSG00000167751 | 23 transcript | coding | — | — | — | — |
| (SEQ ID NO: 51-73) | | peptidase 2 | | variants | | | | | |
| | | (synonyms: KLK2A2, | | | | | | | |
| | | hGK-1, hK2) | | | | | | | |
| | | Reference marker | | | | | | | |
| PCaD92 | EMC7 | ER membrane | ENSG00000134153 | 4 transcript | coding | — | — | — | — |
| (SEQ ID NO: 74-77) | | protein complex | | variants | | | | | |
| | | subunit 7 | | | | | | | |
| | | (synonyms: | | | | | | | |
| | | C11orf3, C15orf24, | | | | | | | |
| | | HT022, ORF1-FL1) | | | | | | | |
| | | Reference marker | | | | | | | |
| PCaD93 | RAB7A | RAB7, member RAS | ENSG00000075785 | 18 transcript | coding | — | — | — | — |
| (SEQ ID NO: 78-95) | | oncogene family | | variants | | | | | |
| | | (synonyms: Rab7a) | | | | | | | |
| | | Reference marker | | | | | | | |
| PCaD94 | VCP | Valosin containing | ENSG00000165280 | 36 transcript | coding | — | — | — | — |
| (SEQ ID NO: 96-131) | | protein (synonyms: | | variants | | | | | |
| | | CDC48, FTDALS6, | | | | | | | |
| | | TERA, p97) | | | | | | | |
| | | Reference marker | | | | | | | |
| PCaD30 | PCA3 | Prostate cancer | ENSG00000225937 | 4 transcript | non | 0.791/ | 0.767/ | 0.821/ | 7.27E−08/ |
| (SEQ ID NO: 132-135) | | associated 3 | | variants | coding | 0.761/ | 0.724/ | 0.805/ | 0.00000715/ |
| | | (synonyms: DD3, | | | | 0.741^{#} | 0.717^{#} | 0.778^{#} | 2.43E−08^{#} |
| | | NCRNA00019, | | | | | | | |
| | | PCAT3, PRUNE2- | | | | | | | |
| | | AS1) | | | | | | | |
| | | Biomarker | | | | | | | |

PPV: positive predictive value;
NPV: negative predictive value;
AUC: area under the curve;
IVC: independent validation cohort (see FIG. 1);
*sequences and transcript IDs for each transcript variant are provided in the sequence listing and in table 6 under the corresponding SEQ ID NOs of biomarkers and reference genes, if no known transcript variant is given, than the sequence of the corresponding gene ID is entered into the respective SEQ ID NO;
**sequences are either protein coding or non-coding;
***statistical evaluation only applicable for biomarker not reference markers;
^{#}Prostacheck PCA3/Progensa PCA3 assay (incl. QC filter)/Progensa PCA3 assay (excl. QC filter)

[0062] For detection of the biomarkers of table 2 specific primer and probes were designed. As the person skilled in the art is aware there are usually numerous possible design options available to obtain specific and reliable primers and probes for a sufficiently long target sequence. Hence, any primer or probe which is suited for reliable and specific detection of the biomarkers and reference genes as listed in table 2 is part of the present invention. The inventors specifically designed and validated the primers and probes listed in table 3. As stated above these primers and probes are to be understood as possible examples, other primers and probes are available and the skilled person in the art in aware on how to design and validate these. Thus, table 3 does not represent a comprehensive list of all primers and probes of the invention. Use of the primers and probes of table 3 for detection of the biomarkers and reference genes is a preferred embodiment of the invention.

TABLE 3
List of primers (FW, RE), probes (PR) and amplicon
positions used for amplification and detection of
target biomarkers and reference genes of table 2.

| Biomarker | | | | |
|---|---|---|---|---|
| label | | | | |
| (SEQ ID | | Oligo | | Amplicon |
| NO) | Target gene | Type | Sequence (5'-3') | position* |
| PCaD2 | CPNE4 | FW | GCAAATCAAAGCAGGTGAGA | hg38: |
| (SEQ ID NO: | (intron) | | | chr3:132241508- |
| 136) | | | | 132241581 |
| PCaD2 | CPNE4 | RE | ACTATGCCTCACCACCATCA | |
| (SEQ ID NO: | (intron) | | | |
| 137) | | | | |
| PCaD2 | CPNE4 | PR | AGGCTACACCCAAACCCTGT | |
| (SEQ ID NO: | (intron) | | CCTTC | |
| 138) | | | | |
| PCaD4 | CPNE4 | FW | ACCTTGGGCCTCTGCTAAA | hg38: |
| (SEQ ID NO: | (intron) | | | chr3:132259812- |
| 139) | | | | 132259946 |
| PCaD4 | CPNE4 | RE | TTCCTGCTGACTTCCACTTG | |
| (SEQ ID NO: | (intron) | | | |
| 140) | | | | |
| PCaD4 | CPNE4 | PR | ACTCAATGGGTGACACTCAC | |
| (SEQ ID NO: | (intron) | | AGGACA | |
| 141) | | | | |
| PCaD11 | TAPIR | FW | ATTGACCGCAGAGCTACCTT | hg38: |
| (SEQ ID NO: | | | | chr2:1621114- |
| 142) | | | | 1621206 |
| PCaD11 | TAPIR | RE | GCATGAAAGTGGACCAACAC | |
| (SEQ ID NO: | | | | |
| 143) | | | | |
| PCaD11 | TAPIR | PR | TCTGGATGCCACACGGCCTC | |
| (SEQ ID NO: | | | | |
| 144) | | | | |
| PCaD32 | KLK3 | FW | CAAGCTTACCACCTGCACC | hg38: |
| (SEQ ID NO: | | | | chr19:50854920- |
| 145) | | | | 50856387 |
| PCaD32 | KLK3 | RE | TGGGCAGCTGTGAGGAC | |
| (SEQ ID NO: | | | | |
| 146) | | | | |
| PCaD32 | KLK3 | PR | CTGCGGCGGTGTTCTGGTGCA | |
| (SEQ ID NO: | | | | |
| 147) | | | | |
| PCaD42 | HOXB13 | FW | AACCTGGCCCAGTCATAATC | hg38: |
| (SEQ ID NO: | | | | chr17:48726484- |
| 148) | | | | 48726562 |
| PCaD42 | HOXB13 | RE | GCTAACGATCATGGCAGCTA | |
| (SEQ ID NO: | | | | |
| 149) | | | | |
| PCaD42 | HOXB13 | PR | CATCCTGACAGTGGCAATAA | |
| (SEQ ID NO: | | | TCACGA | |
| 150) | | | | |
| PCaD50 | PCAT14 | FW | CCCAACCGCTGGTAGTTTAT | hg38: |
| (SEQ ID NO: | (intron) | | | chr22:23539571- |
| 151) | | | | 23539689 |
| PCaD50 | PCAT14 | RE | GTATGGTGCCGTGCTATTTG | |
| (SEQ ID NO: | (intron) | | | |
| 152) | | | | |
| PCaD50 | PCAT14 | PR | ATACCGGCTGCCAACCGAGC | |
| (SEQ ID NO: | (intron) | | | |
| 153) | | | | |
| PCaD52 | CPNE4 | FW | GGAAACTGGAAAGACACACG | hg38: |
| (SEQ ID NO: | | | | chr3:132037670- |
| 154) | | | | 132039575 |
| PCaD52 | CPNE4 | RE | AAAGGAAGCTTCAGCTCTGG | |
| (SEQ ID NO: | | | | |
| 155) | | | | |
| PCaD52 | CPNE4 | PR | TCCAGAAACCCGGCGAGTGA | |
| (SEQ ID NO: | | | | |
| 156) | | | | |
| PCaD54 | MSMB | FW | GGAGTCCTGCTTATCACAATGA | hg38: |
| (SEQ ID NO: | | | | chr10:46039986- |
| 157) | | | | 46046255 |
| PCaD54 | MSMB | RE | TCCTGGTTGAATCTCCTGGA | |
| (SEQ ID NO: | | | | |
| 158) | | | | |
| PCaD54 | MSMB | PR | CGTTGTGATCTTTGCCACCT | |
| (SEQ ID NO: | | | | |
| 159) | | | | |
| PCaD58 | FOLH1 | FW | GAAAGCAAAGTGGACCCTTC | hg38: |
| (SEQ ID NO: | | | | chr11:49146715- |
| 160) | | | | 49146863 |
| PCaD58 | FOLH1 | RE | CATACCACACAAATTCAATACGG | |
| (SEQ ID NO: | | | | |
| 161) | | | | |
| PCaD58 | FOLH1 | PR | TTCACAGTGCAGGCAGCTGCA | |
| (SEQ ID NO: | | | | |
| 162) | | | | |
| PCaD91 | KLK2 | FW | TGTGTGCTGGGCTCTGG | hg38: |
| (SEQ ID NO: | | | | chr19:50876968- |
| 163) | | | | 50878495 |
| PCaD91 | KLK2 | RE | GCAGGCTTTTCAGGCAGG | |
| (SEQ ID NO: | | | | |
| 164) | | | | |
| PCaD91 | KLK2 | PR | TCTGGGGGTCCACTTGTCTG | |
| (SEQ ID NO: | | | TAATGG | |
| 165) | | | | |
| PCaD92 | EMC7 | FW | AGTGATCCTGACATGAGACGG | hg38: |
| (SEQ ID NO: | | | | chr15:34084364- |
| 166) | | | | 34088073 |
| PCaD92 | EMC7 | RE | TGTTTTACTGCTGCCGCTGC | |
| (SEQ ID NO: | | | | |
| 167) | | | | |
| PCaD92 | EMC7 | PR | TGCTGAATTCCAACCATGAGT | |
| (SEQ ID NO: | | | TGCC | |
| 168) | | | | |
| PCaD93 | RAB7A | FW | AGGCGTTCCAGACGATTGC | hg38: |
| (SEQ ID NO: | | | | chr3:128807634- |
| 169) | | | | 128813446 |
| PCaD93 | RAB7A | RE | CTGTGCTCAACTCTCACTGC | |
| (SEQ ID NO: | | | | |
| 170) | | | | |
| PCaD93 | RAB7A | PR | ACCGGGCCAAGGCCTCGGCA | |
| (SEQ ID NO: | | | | |
| 171) | | | | |
| PCaD94 | VCP | FW | TTTGCCCAGACCCTTCAGC | hg38: |
| (SEQ ID NO: | | | | chr9:35057089- |
| 172) | | | | 35057419 |
| PCaD94 | VCP | RE | CAGCTCACTGCACGCTGG | |
| (SEQ ID NO: | | | | |
| 173) | | | | |
| PCaD94 | VCP | PR | AGGGCAGTGGAGGCGGCACAGG | |
| (SEQ ID NO: | | | | |
| 174) | | | | |
| PCaD30 | PCA3 | FW | CACACACACAGGAAGCACAA | hg38: |
| (SEQ ID NO: | | | | chr9:76783854- |
| 175) | | | | 76784201 |
| PCaD30 | PCA3 | RE | AATGTCCTTCCCTCACAAGC | |
| (SEQ ID NO: | | | | |
| 176) | | | | |
| PCaD30 | PCA3 | PR | ATGAGCCTCGCCCTGTGCCT | |
| (SEQ ID NO: | | | | |
| 177) | | | | |

FW: forward primer;
RE: reverse primer;
RP: probe;
*: position of amplicon as defined by respective forward and reverse primers on reference human genome assembly hg38

[0063] The biomarker PCA3 is routinely used for prostate carcinoma (PCa) diagnosis. As expected therefore, PCA3 expression levels were indicative of PCa in the subjects tested by next generation sequencing by the inventors (FIG. 2). However, it was found that the biomarker had its highest expression level in very low risk tumours (V) and decreased as the risk factor of tumours grew. This finding makes PCA3 an unreliable marker for medium- and high-risk tumours and shows the need for better prostate cancer biomarkers.

[0064] Hence, the invention relates to a method for the diagnosis of prostate cancer comprising the steps of analysing the expression level of the nucleic acid according to SEQ ID NO: 1-3 and 19-50, wherein, if at least one of said nucleic acids is present and/or the expression level of at least one of said nucleic acids is above a threshold value, the sample is designated as prostate cancer positive.

[0065] In an alternative embodiment, analysing the expression level of a nucleic acid means analysing the reverse complement or the cDNA of the nucleic acid. The experimental results demonstrate high specificity and sensitivity of the novel biomarkers for the detection of PCa as shown in FIG. 3.

[0066] In a preferred embodiment, the sample is selected from the group comprising prostate tissue, biopsy material, lymph nodes, urine, ejaculate, blood, blood serum, blood plasma, circulating tumour cells in blood or lymph, any tissue suspected of containing metastases as well as any source that may contain prostate tumour cells or parts thereof, including vesicles like exosomes, micro vesicles, and others as well as free or protein-bound RNA molecules derived from prostate tumour cells or parts thereof. More preferably the sample is urine, even more preferably the sample is urinary sediment, still more preferably the sample is urine obtained from a patient after a digital rectal examination and most preferably the sample is urinary sediment obtained from a patient after a digital rectal examination.

[0067] Measurement of the RNA biomarkers of the invention can be done by any method suited to specifically estimate RNA levels, e.g. PCR-based methods like qRT-PCR. The assays can be applied for early diagnosis (screening) of PCa, for predicting the aggressiveness of the tumours (prognosis), and/or for aiding the choice of therapy.

[0068] In one aspect of the invention, the expression level of a transcript of the biomarker nucleic acids according to SEQ ID NO: 1-3 and 19-50, is compared to the expression level of one or several other gene transcripts in the sample, which are used as reference genes. Thus, the expression levels of the biomarker genes can be normalized according to the expression levels of the reference genes. Examples of suitable reference genes are shown below in Table 4, however this list is not exhaustive, the person skilled in the art is aware of further possible candidates.

TABLE 4
Potential reference genes

Synonyms

General reference genes

| | |
|---|---|
| EMC7—ER membrane protein | C11orf3, C15orf24, HT022, |
| complex subunit 7 | ORF1-FL1 |
| GAPDH—Glyceraldehyde 3- | G3PD, GAPD, HEL-S-162eP |
| phosphate dehydrogenase | |
| GPI—glucose-6-phosphate | AMF, GNPI, NLK, PGI, PHI, |
| isomerase | SA-36, SA36 |
| HMBS—hydroxymethylbilane | PBG-D, PBGD, PORC, UPS |
| synthase | |
| HPRT1—hypoxanthine | HGPRT, HPRT |
| phosphoribosyltransferase 1 | |
| RAB7A—RAB7A, member RAS | Rab7, CMT2B, PRO2706 |
| oncogene family | |
| TBP—Tata box binding protein | GTF2D, GTF2D1, HDL4, SCA17, |
| | TBP1, TFIID |
| VCP—valosin containing protein | CDC48, FTDALS6, TERA, p97 |

Prostate specific reference genes

| | |
|---|---|
| ACPP—acid phosphatase, prostate | ACP3, FRAP, LAP, PAP, PPAL |
| KLK2—kallikrein related peptidase 2 | KLK2A2, hGK-1, hK2 |
| KLK3—kallikrein related peptidase 3 | APS, KLK2A1, PSA, hK3 |
| RDH11—retinol dehydrogenase 11 | ARSDR1, CGI82, HCBP12, |
| | MDT1, PSDR1, RALR1, RDJCSS, |
| | SCALD, SDR7C1 |

[0069] In another aspect of the invention the method of the invention involves stringent quality control criteria for inclusion of subjects' samples into diagnostic tests. The inventors of the present invention surprisingly found that a three-tier quality control protocol ensures reliable and accurate diagnostic tests. The first tier involves the careful review of amplification curves regarding appropriate sigmoid curve shape and sufficiently large amplification as well as sufficient amplification efficiency. Only amplification of sufficient quality and reliability can be validly included into the diagnostic analysis. This includes confirming a sigmoid shape of the amplification curve, i.e. a difference of the asymptotes of at least 1.5, and a minimal amplification efficiency of the qPCR of at least 1.5.

[0070] Furthermore, quality control (QC) of test samples involves a first QC filter. The first filter tests for sufficient minimal amount of cells and for sufficient minimal amount of prostate cells within the sample (urinary sediment sample). The first QC filter comprises determining the expression of a selection of generally applicable reference genes in combination with at least one prostate specific reference gene. The inventors tested different possible reference genes for applicability within the method of the invention. The person skilled in the art is aware that commonly any gene with consistent and reliably detectable expression which is stable across at least most cellular conditions and cultivation states, is a potential candidate for a reference gene. Although suitability of candidate for a particular application always needs to be tested and appropriately established. Suitable approaches for selection of candidate genes and testing of suitability is within the common knowledge of the person skilled in the art. Suitable candidates for reference genes can be selected from but are not limited to the group of genes as listed in table 4. A number of genes were tested as candidate reference genes, wherein the following genes were tested as general reference genes: EMC7, GAPDH, GPI, HMBS, HPRT1, RAB7A, TBP and VCP and the following genes were tested as prostate specific reference genes: ACPP, KLK2, KLK3 and RDH11 (table 4). All these reference genes may be used in alternative embodiments of the invention. In a preferred embodiment of the invention the reference genes of the first QC filter are selected from the group comprising general reference genes EMC7, RAB7A and VCP, and prostate specific reference gene KLK2. Further relevant information on these reference markers is provided in tables 2 and 3.

[0071] For a sample to pass the first QC filter all of the four tested reference genes (EMC7, RAB7A, VCP, KLK2) have to show expression levels above the threshold level. The inventors determined the following threshold levels: for EMC7 a sample passes the threshold if the expression level is at least smaller than a c_{q}-value of 28 (all c_{q}-values of this invention are calculated according to Cy₀ method—Guescini, 2008; however alternative approaches for calculation of c_{q}-values are well known in the art and are equally valid for the present invention), for RAB7A the threshold is if the expression level is at least smaller than a c_{q}-value of 30, for VCP the threshold is if the expression level is at least smaller than a c_{q}-value of 28, for KLK2 the threshold is if the expression level is at least smaller than a c_{q}-value of 28.

[0072] For further improved reliability of the first QC filter, expression levels are determined in triplicate amplification reactions. Each test is only suited for analysis if either the maximal difference of c_{q}-value between individual triplicates is at most 0.5 or if at least the maximal difference of c_{q}-value between two triplicates is at most 0.25. If a sample does not pass the first QC filter the sample is invalid and excluded from further analysis. The described first QC filter is then combined with a second QC filter.

[0073] The second QC filter is applied after normalization and calibration of the observed diagnostic results. This aspect of the quality control of the invention ensures that only reliable and reproducible data without large variance are included in the analysis. The person skilled in the art is aware that this aspect of the invention depends on the method and device used for quantifying the expression levels of the biomarkers and it is within the skill of the skilled person of the art to accordingly adjust these quality control methods to a different method than RT-qPCR. Also minimal variations in the number of replicates (4, 5 or 6 replicates instead of 3) or slight variations of the cut-off values will only minimally affect this quality control test and are therefore also included in the present invention.

[0074] Similarly, to the reference genes the selected biomarkers were also determined in triplicate amplification reactions for each sample to ensure reliable diagnostics. If the c_{q}-value of at least two triplicates of a sample is at least smaller than a selected threshold value, the respective test is only suited for analysis if either the maximal difference of c_{q}-value between individual triplicates is at most 0.5 or if at least the maximal difference of c_{q}-value between two triplicates is at most 0.25. If a sample does not pass this test the sample is invalid and excluded from further analysis. Alternatively, if the c_{q}-value of at least two triplicates of each test is not at least smaller than a selected threshold value or no threshold was preselected, the respective test may still be analysed using only valid c_{q}-values. A valid c_{q}-value in the meaning of the present invention refers to a c_{q}-value of a sample that has passed all prior QC checks. However, in this alternative case an increased variance of results can be expected. As stated above the person skilled in the art is aware that this quality control may be adapted to different methods with slight variations, which are also included in the present invention.

[0075] The measured c_{q}-values of valid replicates for each sample, i.e. replicates which passed all prior QC steps, are used for diagnostic analysis. Diagnostic analysis comprises calculation of arithmetic means for each set of technical replicate measurements (formula 1).

$${Cq}_{jk} = \overline{{Cq}_{jk}} = \frac{{\sum }_{i = 1}^{N} {Cq}_{ijk}}{N} \qquad Formula 1$$

$$Mean {c}_{q} - value calculation ; N : number of technical replicates ; i : count of technical replicates ; j : counter of genes ; k : counter of samples$$

[0076] For a relative quantification, an average expression over all samples on the same plate is calculated for each gene separately (formula 2). Reference samples for inter-run calibration are excluded from this calculation.

$${Cq}_{reference , j} = \overline{{Cq}_{j}} = \frac{{\sum }_{k = 1}^{s} {Cq}_{jk}}{s} \qquad Formula 2$$

$$Mean {c}_{q} - value calculation per gene for all samples ; s : number of samples ; k : counter of samples ; j : counter of genes$$

[0077] The difference of mean c_{q}-values (formula 1) and the average expression for the respective gene (Cq_{reference,j}, formula 2) is calculated and represents the relative quantification of the expression level of biomarkers or reference genes in the respective samples (formula 3).

$${RQ}_{jk} = Δ {Cq}_{jk} = {Cq}_{jk} - {Cq}_{reference , j} \qquad Formula 3$$

$$Calculation of relative quantification : RQ ; j : counter of genes ; k : counter of samples$$

[0078] These relative quantifications are normalized according to standard practice in the field by first calculating a normalization factor. The normalization factor is calculated as the arithmetic mean of the relative quantifications of the reference genes (formula 4).

$${NF}_{k} = \frac{{\sum }_{p = 1}^{f} {RQ}_{pk}}{f} \qquad Form ula 4$$

$$Calculation of normalization factor : NF ; f : number of reference genes ; p : counter of reference genes ; k : counter of samples$$

[0079] In a preferred embodiment the used reference genes are the general reference genes of the first QC filter. Nevertheless, the person skilled in the art is aware, how to select and validate a possible alternative set of reference genes. The thus obtained normalization factor is subsequently used to calculate normalized relative quantification of the selected biomarkers by calculating the difference of the relative quantification of the biomarker and the normalization factor (formula 5). This normalization ensures comparability of test samples within a run (intra-run normalization).

$$N {RQ}_{jk} = {RQ}_{jk} - {NF}_{k} \qquad Formula 5$$

$$Normalization of relative quantification : N RQ ; j : counter of genes ; k : counter of samples$$

[0080] For a reproducible diagnostic assay an inter-run calibration is required. Inter-run calibrations are calculated in an analogous manner to normalization. Firstly, a calibration factor is determined, wherein the calibration factor is the arithmetic mean of the normalized relative quantifications of inter-run calibrator. For inter-run calibration a pool of three PCa tissue samples and a pool of three tissue samples of BPH patients was included for each run/test plate. For each gene, the average expression in these two calibrator samples was calculated (formula 6).

$${CF}_{jl} = \frac{{\sum }_{m = 1}^{c} N {RQ}_{jlm}}{c} \qquad Formula 6$$

$$Calculation of calibration factor : CF ; c : number of inter - run calibrators ; m : counter of inter - run calibrators ; j : counter of genes ; I : counter of runs / test plates$$

[0081] At least one calibrator sample has to be validly detected. Subsequently the calibration factor is used to calibrate the normalized relative quantification of the selected biomarkers by calculating the difference of the normalized relative quantification of the biomarker and the calibration factor (formula 7). This calibration ensures comparability of test samples between separate runs (inter-run calibration).

$$CN {RQ}_{jkl} = N {RQ}_{jkl} - {CF}_{jl} \qquad Formula 7$$

$$Calibration of normalized relative quantification : CN RQ ; j : counter of genes ; k : counter of samples ; I : counter of runs / test plates$$

[0082] The person skilled in the art is aware of alternative mathematical approaches of calculating gene normalization and calibration, which are also included in the present invention.

[0083] Normalized and calibrated results are subsequently checked by applying the second QC filter. This second QC filter determines if the subjects' sample contains a minimal amount of prostate cells which is sufficient for detection of the selected biomarkers for prostate cancer. As with the first QC filter the person skilled in the art is aware on how to select and validate suitable reference genes. For the prostate specific reference genes the inventors considered and tested several possible candidates. Suitable reference genes can be selected but are not limited to the following group: ACPP, KLK2, KLK3 and RDH11 (table 4). In a preferred embodiment of the invention the reference genes for the second QC filter are selected from the group of prostate specific reference genes KLK2 and KLK3.

[0084] For a sample to pass the second QC filter the tested reference genes have to show expression levels above the threshold level. The inventors determined the following threshold levels: for KLK2 a sample passes the threshold if the expression level is at least smaller than a calibrated relative quantification of 9.6676667 and for KLK3 the threshold is if the expression level is at least smaller than a calibrated relative quantification of 11.113. If a sample does not pass the second QC filter the sample is invalid and excluded from further analysis.

[0085] The calibrated relative quantifications of the selected biomarkers are then combined into a mathematical predictive model for diagnosis of the patient. The inventors found two applicable and predictive models using different sets of biomarkers. These two models were surprisingly found to achieve superior diagnostic predictive power than diagnostic methods of the state of the art (table 1). The identified models share two common biomarkers, which are essential to both models. The common biomarkers are PCaD4 and PCaD50. Hence in one aspect of the invention the method of diagnosis of PCa comprises the detection of at least biomarkers PCaD4 and PCaD50. The determined expression levels are then used within a mathematical model to obtain the patient's diagnosis.

[0086] Alternatively, the inventors identified a first model for diagnosis. This model combines the calibrated and normalized relative quantifications of the following biomarkers: PCaD4, PCaD54, PCaD50 and PCaD42. This model was found to have an AUC of 0.817 and a specificity at 90% sensitivity 0.512. A logistic regression model was fitted to the observed data for each transcript or gene to receive regression coefficients.

[0087] Alternatively, the inventors identified a second model for diagnosis. This model combines the calibrated and normalized relative quantifications of the following biomarkers: PCaD4, PCaD11, PCaD50, PCaD52, PCaD58 and PCaD2. This model was found to have an AUC of 0.829 and a specificity at 90% sensitivity 0.605. A logistic regression model was fitted to the observed data for each transcript or gene to receive regression coefficients. The threshold value is the minimal score value calculated from the calibrated and normalized relative expression of the selected biomarkers between the test sample and the control sample according to the applied model, at which score value the respective sample is designated as cancer-positive.

[0088] For the essential minimal set of both models comprising biomarkers PCaD4 and PcaD50, which were statistically analysed analogously to the above regression models the respective test parameters were also determined within the validation cohort. For this essential minimal set of PCaD4 and PcaD50 an AUC of 0.832 was determined with a 95% Cl of 0.74-0.92. The respective specificity at 90% sensitivity for the essential minimal set is 0.721. These parameters indicate that even the essential minimal set already achieves superior predictive value compared to reference tests SelectMDx and Progensa PCA3 (see table 1).

[0089] The logistic regression model allows the prediction of the tumour status of a test sample by combining the measured expression values of the sample with the determined regression coefficients of the model. For an estimated tumour probability of ≥50% a sample is classified as tumour positive for the respective model (model 1 or model 2). The invention is concerned with the quantification of the expression level of RNA biomarkers. After amplification, quantification is straightforward and can be accomplished by a number of methods. In the case when primers are used wherein at least one primer has a fluorescent dye attached, quantification is possible using the fluorescent signal from the dye. Various primer systems and dyes are available, such as SYBR green, Multiplex probes, TaqMan probes, molecular beacons and Scorpion primers. These are suitable for instance to carry out PCR-based methods such as quantitative reverse transcription PCR (qRT-PCR). Other possible means of quantification are for example northern blotting, next generation sequencing or absorbance measurements at 260 and 280 nm.

[0090] Any suitable method for the quantification of nucleic acids may be used to analyse the expression levels of the nucleic acids. In one embodiment of the invention, the analysis in the method is performed by a fluorescence based assay. In a preferred embodiment, the analysis is done by measuring the fluorescence of a labelled primer, labelled probe or a fluorescent detection agent (such as SYBR green). More preferably, this analysis of the expression level is performed by RT-qPCR. In this method, after reverse transcription, the sample is mixed with a forward and a reverse primer specific for at least one nucleic acid selected from the group of SEQ ID NO: 1 to 131, preferably selected from the group of primers and probes as listed in table 2 (SEQ ID NO: 136-174), followed by amplification. Probes or primers are designed such that they hybridize under stringent conditions to their respective target sequence.

[0091] In one embodiment, the analysis of the expression level is performed by next generation sequencing.

[0092] The invention also relates to a nucleic acid that hybridizes under stringent conditions to one of the nucleic acids according to SEQ ID NO: 1 to 131, or any part thereof, wherein said nucleic acid is a primer or a probe, preferably a labelled probe.

[0093] In a preferred embodiment of the invention, the nucleic acid that hybridizes under stringent conditions to one of the nucleic acids according to SEQ ID NO: 1-131 is about 5 to 500 nt in length, more preferably, 10 to 200 nt, even more preferably 10 to 100 nt. In the most preferred embodiment, said nucleic acid is 5, 6, 7, 8, 9, 10, 11, 12, 13, 14, 15, 16, 17, 18, 19, 20, 21, 22, 23, 24, 25, 26, 27, 28, 29 or 30 nt in length.

[0094] In one embodiment of the invention, the nucleic acid that hybridizes under stringent conditions to one of the nucleic acids according to SEQ ID NO: 1-131 comprises a detectable label. In an even more preferred embodiment, the nucleic acid that hybridizes under stringent conditions to one of the nucleic acids according to SEQ ID NO: 1-131 additionally comprises a quencher moiety.

[0095] The invention also relates to the use of a nucleic acid that hybridizes under stringent conditions to one of the nucleic acids according to SEQ ID NO: 1-131 for the diagnosis of prostate cancer.

[0096] The invention further relates to a nucleic acid with a sequence from the group of SEQ ID NO: 1 to 131, or the reverse complement thereof or any part thereof, or a nucleic acid that shares preferably at least 85%, 90%, 95% or 99% sequence identity with a nucleic acid according to any one of the nucleic acids according to SEQ ID NO: 1 to 131 or the reverse complement thereof or any part thereof, preferably the nucleic acid is selected from the group comprising SEQ ID No: 136-174.

[0097] The invention further relates to the use of a nucleic acid with a sequence from the group of SEQ ID NO: 1 to 131 for the diagnosis of prostate cancer.

[0098] The invention also relates to a kit for the diagnosis of prostate cancer comprising at least one nucleic acid that hybridizes under stringent conditions to one of the nucleic acids according to SEQ ID NO: 1-131. The kit may contain more than one nucleic acid. In a preferred embodiment, the kit additionally comprises reagents for nucleic acid amplification and/or quantification and/or detection. In another embodiment, the kit comprises control samples.

[0099] In an alternative embodiment, the invention relates to a method for the treatment and diagnosis of prostate cancer comprising the steps of analysing the expression level of the nucleic acid according to SEQ ID NO: 1-3 and 19-50 in a sample from a patient, wherein, if the expression level of said nucleic acid is above a threshold value, the sample is designated as prostate cancer positive; and administering to the patient one or more Prostate Cancer Therapeutic Agents.

[0100] In one embodiment, the Prostate Cancer Therapeutic Agents comprises: Docetaxel (Taxotere®); Cabazitaxel (Jevtana®); Mitoxantrone (Novantrone®); Estramustine (Emcyt®); Doxorubicin (Adriamycin®); Etoposide (VP-16); Vinblastine (Velban®); Paclitaxel (Taxol®); Carboplatin (Paraplatin®); Abiraterone acetate, Bicalutamide, Casodex, Degarelix, Enzalutamide, Goserelin acetate, Leuprolide acetate, Prednisone, Sipuleucel-T, Radium 223 dichloride and/or Vinorelbine (Navelbine®).

[0101] One aspect of the present invention is a method for the ex-vivo diagnosis of prostate cancer comprising the steps of
[0102] a) providing a sample from a patient suspected of having prostate cancer,
[0103] b) analysing the expression level of at least the nucleic acids according to SEQ ID NO: 2 and SEQ ID NO: 20 in the sample,
   [0104] wherein, if the expression level of said nucleic acids is above a threshold value, the sample is designated as prostate cancer positive.

[0105] In another alternative aspect the present invention involves a method for the ex-vivo diagnosis of prostate cancer comprising the steps of
[0106] a) providing a sample from a patient suspected of having prostate cancer,
[0107] b) analysing the expression level of at least the nucleic acids according to SEQ ID NO: 2, SEQ ID NO: 19-20 and SEQ ID NO: 35-37 in the sample,
   [0108] wherein, if the expression level of said nucleic acids is above a threshold value, the sample is designated as prostate cancer positive.

[0109] In another alternative aspect the present invention involves a method for the ex-vivo diagnosis of prostate cancer comprising the steps of
[0110] a) providing a sample from a patient suspected of having prostate cancer,
[0111] b) analysing the expression level of at least the nucleic acids according to SEQ ID NO: 1-3, SEQ ID NO: 20-34 and SEQ ID NO: 38-50 in the sample,
   [0112] wherein, if the expression level of said nucleic acids is above a threshold value, the sample is designated as prostate cancer positive.

[0113] In one embodiment of the present invention the sample for the method of the invention is selected from the group comprising prostate tissue, biopsy material, lymph nodes, urine, ejaculate, blood, blood serum, blood plasma, circulating tumour cells in blood or lymph, any tissue suspected of containing metastases as well as any source that may contain prostate tumour cells or parts thereof, including vesicles like exosomes, micro vesicles, and others as well as free or protein-bound RNA molecules derived from prostate tumour cells.

[0114] In a preferred embodiment of the invention the sample is a urine sample, in a more preferred embodiment the sample is urinary sediment. In an even more preferred embodiment the sample is a urine sample obtained after digital rectal examination (DRE): DRE-urine, in a most preferred embodiment the sample is urinary sediment obtained after DRE: DRE urinary sediment. DRE is a routinely performed examination method which allows getting urine samples that contain a certain amount of prostate cells. Obtained DRE urine samples are centrifuged and washed two times using PBS to isolate cells. The isolated cells are subsequently lysed and the contained RNA is isolated according to commonly known and well-established techniques. The skilled person in the art is well aware of different applicable approaches of obtaining purified RNA from cellular samples.

[0115] In another embodiment of the invention the method involves analysis of the expression level by measuring the fluorescence of a labelled primer, labelled probe or a fluorescent detection agent. In another embodiment of the invention the method involves analysis of the expression level by qRT-PCR.

[0116] In another embodiment of the invention the method involves normalization of the expression levels of biomarkers to general and prostate cell specific reference genes.

[0117] In a preferred embodiment of the invention the general and prostate cell specific reference genes are selected from the group comprising: EMC7, RAB7A, VCP, KLK2 and KLK3.

[0118] In another embodiment of the method of the invention the method involves using general and prostate cell specific reference genes to evaluate sample quality. The expression levels of the general and prostate cell specific reference genes are used to provide at least one quality control filter, only samples which pass the at least one quality control filter are included in analysis.

[0119] In another aspect of the invention, the invention involves nucleic acids that hybridize under stringent conditions to one of the nucleic acids of SEQ ID NO: 1-3 and 19-50. This means that the invention involves nucleic acids that share at least 85%, 90%, 91%, 92%, 93%, 94%, 95%, 96%, 97%, 98% or 99% sequences identity with one of the sequences of SEQ ID NO: 1-3 and 19-50 or the reverse complement thereof or any partial sequence thereof. Preferably the nucleic acid is selected from the group comprising SEQ ID No: 136-144 and 148-162, wherein these nucleic acids can be used primers or probes to detect the sequences of SEQ ID NO: 1-3 and 19-50 or sequences that share at least 85%, 90%, 91%, 92%, 93%, 94%, 95%, 96%, 97%, 98% or 99% sequences identity thereof.

[0120] The above nucleic acids which can be used as primer or probes are about 10 to 100 nucleotides in length, more preferably about 10-50 nucleotides, even more preferably about 15-40 nucleotides, even more preferably about 15-35 nucleotides and most preferably about 15-25 nucleotides.

[0121] The above nucleic acids may further comprise a detectable label. In a preferred embodiment the detectable label is a fluorescent label which is covalently attached to the nucleic acid. The fluorescent label may be further combined with at least one quencher molecule which is also covalently attached to the nucleic acid and which may quench the fluorescence signal of the fluorescent label.

[0122] The above described nucleic acid can be used for the diagnosis of prostate cancer.

[0123] A nucleic acid with one of the sequences of SEQ ID NO: 1-131, or the reverse complement thereof or any part thereof, or a nucleic acid that shares preferably at least 85%, 90%, 91%, 92%, 93%, 94%, 95%, 96%, 97%, 98% or 99% sequence identity with one of the sequences of SEQ ID NO: 1-131, or the reverse complement thereof or any part thereof, preferably the nucleic acid is selected from the group comprising SEQ ID No: 136-174 wherein these nucleic acids can be used primers or probes to detect the sequences of SEQ ID NO: 1-131 or sequences that share at least 85%, 90%, 91%, 92%, 93%, 94%, 95%, 96%, 97%, 98% or 99% sequences identity thereof.

[0124] The above nucleic acids may further comprise a detectable label. In a preferred embodiment the detectable label is a fluorescent label which is covalently attached to the nucleic acid. The fluorescent label may be further combined with at least one quencher molecule which is also covalently attached to the nucleic acid and which may quench the fluorescence signal of the fluorescent label. The describes labelled primers or probes can be used for the diagnosis of prostate cancer.

[0125] In another aspect of the invention, the invention also involves a kit for the diagnosis of prostate cancer comprising any of the above described nucleic acid according to any one of SEQ ID NO: 1-3 and 19-50, or SEQ ID NO: 1-131, or SEQ ID NO: 136-144 and 148-162, or SEQ ID NO: 136-174 and optionally also comprising reagents for nucleic acid amplification and/or quantification and/or detection.

[0126] In a further aspect of the invention, the invention also involves a method for the treatment and diagnosis of prostate cancer comprising the steps of
[0127] a) analysing the expression level of the nucleic acid according to any one of SEQ ID NO: 2 and 20, or SEQ ID NO: 2, 19-20 and 35-37, or SEQ ID NO: 1-3, 20-34 and 38-50 in a sample from a patient,
[0128] b) wherein, if the expression level of said nucleic acid is above a threshold value, the sample is designated as prostate cancer positive; and
[0129] c) administering to the patient one or more Prostate Cancer Therapeutic Agents.

[0130] Possible known Prostate Cancer Therapeutic Agents are selected but not limited to the group comprising: Docetaxel (Taxotere®); Cabazitaxel (Jevtana®); Mitoxantrone (Novantrone®); Estramustine (Emcyt®); Doxorubicin (Adriamycin®); Etoposide (VP-16); Vinblastine (Velban®); Paclitaxel (Taxol®); Carboplatin (Paraplatin®); Abiraterone acetate, Bicalutamide, Casodex, Degarelix, Enzalutamide, Goserelin acetate, Leuprolide acetate, Prednisone, Sipuleucel-T, Radium 223 dichloride and/or Vinorelbine (Navelbine®).

[0131] In a further aspect of the invention, the invention involves a method for the diagnosis of prostate cancer comprising the steps of
[0132] a) analysing the expression level of at least the nucleic acids according to SEQ ID NO: 2 and 20, or SEQ ID NO: 2, 19-20 and 35-37, or SEQ ID NO: 1-3, 20-34 and 38-50 in a sample from a patient,
[0133] b) wherein, if the expression level of said nucleic acids is above a threshold value, the sample is designated as prostate cancer positive.

[0134] The below examples present in detail the methods applied for identifying and evaluating novel biomarkers and reference genes for diagnosis of PCa. The newly identified biomarkers and the above describes diagnostic methods based on these biomarkers allow a more accurate and sensitive diagnosis of the disease than current biomarkers.

### Examples

### Materials and Methods

### Clinical Cohort

[0135] Prostate carcinoma (PCa) patients who underwent radical prostatectomy (RPE) or surgery to remove a benign prostate hyperplasia (BPH) were included in a retrospective clinical cohort aiming at identifying novel biomarkers for PCa. Approval from the local ethics committee as well as informed consent from the patients were obtained according to the legal regulations. Data on the clinical follow-up were collected for at least five years for the PCa patients.

[0136] Prostate tissue samples from a cohort of 40 PCa patients and 8 BPH patients were used for identification of diagnostically relevant biomarkers by genome-wide RNA sequencing. Four PCa groups were defined based on staging according to Gleason (The Veteran's Administration Cooperative Urologic Research Group: histologic grading and clinical staging of prostatic carcinoma; in Tannenbaum, M. Urologic Pathology: The Prostate, Philadelphia: Lea and Febiger. Pp. 171-198) as well as the presence of metastases in the adjacent lymph nodes upon RPE (see Table 5). The composition of test cohorts is also shown in FIG. 1.

[0137] Selected biomarker candidates were further validated by custom microarrays and quantitative reverse-transcription real-time PCR (qRT-PCR) on cohorts comprising 203 (39 control BPH, 164 tumour samples) and 338 patients (126 control BPH samples, 212 tumour samples), respectively.

TABLE 5
PCa cohort for genome-wide RNA sequencing screening: The control group (C) consists
of BPH samples. The very low risk (V) and low risk (L) groups comprise samples from
patients graded with Gleason Score (GS) < 7 and = 7, respectively, all
without lymph node metastases (pN0). The medium risk (M) group comprises cases with
GS <= 7 and exhibiting lymph node metastases (pN+); and the high risk
(H) group consist of tissues with GS > 7. For the latter, pairs of tumour and
tumour-free tissue samples obtained from the same patient were analysed.

| Group | C | V | L | M | H | | | |
|---|---|---|---|---|---|---|---|---|
| Gleason score | BPH | GS < 7 | GS = 7 | GS <= 7 | GS > 7 | | | |
| lymph node metastasis | — | pN0 | pN0 | pN+ | pN0 | | pN+ | |
| tissue | control | tumour | tumour | tumour | tumour | tumour- | tumour | tumour- |
| | | | | | | free | | free |
| number of samples | 8 | 8 | 8 | 8 | 8 | 8 | 8 | 8 |

### Prostate Tissue Samples

[0138] Prostate tissue samples were obtained from surgery and stored in liquid nitrogen. Prostate tissue samples obtained from radical prostatectomies (RPEs) of prostate carcinoma (PCa) patients were divided into tumour and tumour-free samples. Prostate tissue samples from patients with benign prostate hyperplasia (BPH) were used as controls. Patient consent was always given.

[0139] To verify the status of the samples and their tumour cell content, all samples were divided into series of cryosections. To this end, frozen tissue samples were embedded in Tissue-Tek OCT-compound (Sakura Finetek GmbH) and fixed on metal indenters by freezing. Cryosections were prepared using a cryomicrotome (Leica) equipped with a microtome blade C35 (FEATHER) cooled to −28° C. Every sample was cut into a total of 208 cryosections, 4 of which were HE-stained and evaluated by a pathologist with respect to their tumour cell content. This yielded 3 stacks of consecutive cryosections, each of which was flanked by HE-stained sections. Only stacks that were flanked on either side by sections containing at least 60% or at most 5% tumour cells were used as tumour or tumour-free samples, respectively. 50 cryosections of the stacks chosen were then subjected to RNA preparation.

### RNA Isolation

[0140] Total RNA was isolated from cryo-preserved tissue using Qiazol and the miRNeasy Mini Kit on the QIAcube (all from Qiagen) with manual subsequent DNase I digestion. RNA concentration was determined using a Nanodrop 1000 (Peqlab). RNA integrity was verified on an Agilent Bioanalyzer 2100 (Agilent Technologies, Palo Alto, CA), and only RNA samples with an RNA-Integrity-Number (RIN) of at least 6 were further processed.

### Genome-Wide Long-RNA Next Generation Sequencing

[0141] Genome-wide long RNA sequencing was performed using a subset of the retrospective PCa cohort comprising 8 prostate tissue samples from benign prostate hyperplasia (BPH) as a control and 56 samples from patients with prostate cancer (including tumour and tumour-free tissue pairs from samples with Gleason score >7). 1 μg of total RNA was depleted of ribosomal RNA using the Ribo-Zero rRNA Removal Kit (Epicentre). Sequencing libraries were prepared from 50 ng of rRNA-depleted RNA using ScriptSeq v2 RNA-Seq Library Preparation Kit (Epicentre). The di-tagged cDNA was purified using the Agencourt AMPure XP System Kit (Beckman Coulter). PCR was carried out through 10 cycles to incorporate index barcodes for sample multiplexing and amplify the cDNA libraries. The quality and concentration of the amplified libraries were determined using a DNA High Sensitivity Kit on an Agilent Bioanalyzer (Agilent Technologies). 4 ng each of 8 samples were pooled and size-selected on 2% agarose gels using agarose gel electrophoresis. The sample range between 150 bp and 600 bp was gel-excised and purified with the MinElute Gel Extraction Kit (Qiagen), according to manufacturer's instructions. The purified libraries were quantified on an Agilent Bioanalyzer using a DNA High Sensitivity Chip (Agilent Technologies). Every purified and size-selected library pool was then loaded onto an Illumina HiSeq2000 flow cell, distributing it among all lanes. Cluster generation was performed using TruSeq PE Cluster Kits v3 (Illumina Inc.) in an Illumina cBOT instrument following the manufacturer's protocol. Sequencing was performed on an Illumina HiSeq2000 sequencing machine (Illumina, Inc.). The details of the sequencing runs were as follows: paired-end sequencing strategy; 101 cycles for Read1, 7 cycles for index sequences, and 101 cycles for Read2.

### Analysis of Sequencing Data: Raw Data Preparation

[0142] Raw sequencing data comprising base call files (BCL files) was processed with CASAVA v1.8.1 (Illumina) resulting in FASTQ files. FASTQ files contain for each clinical sample all sequenced RNA fragments, in the following referred to as “reads”. Specific adapter sequences were removed by using cutadapt v1.6 (http://code.google.com/p/cutadapt/).

### Analysis of Sequencing Data: Genome Mapping and Transcript Assembling:

[0143] Reads were mapped to the human genome (assembly GRCh37/hg19) using segemehl v0.1.4-382 and TopHat v2.0.87. Novel transcripts, i.e. transcripts not annotated in Gencode v17, were assembled using Cufflinks v2.1.18 and Cuffmerge v2.1.1. All novel transcripts and all known Gencode v17 transcripts were combined into a comprehensive annotation set.

### Analysis of Sequencing Data: Statistical Analysis

[0144] Htseq-count v0.6.0 (http://www-huber.embl.de/users/anders/HTSeq/doc/count.html) was used to compute the read counts per transcript and gene that are contained in the comprehensive annotation set of novel and known transcripts. Differentially expressed transcripts and genes were identified using R and the Bioconductor library DeSeq2 v1.81. Raw read counts were normalized, and variance stabilized (vst transformation). A negative binomial log-linear model was fitted to the read counts for each transcript or gene, and coefficients distinct from zero identified by a likelihood ratio test. False discovery rate was controlled by Benjanimi-Hochberg adjustment.

### Validation by Custom Microarrays

[0145] Based on the sequencing results custom microarrays with 180,000 probes (Agilent SurePrint G3 Custom Exon Array, 4x180K, Design-ID 058029) were designed comprising mRNAs, long noncoding RNAs (gencode v15), new transcripts and all transcripts found by RNA sequencing to be expressed differentially between tumour and control tissue samples. Probe design was done using the Agilent custom design tool eArray.

[0146] The microarray screening was performed using the retrospective PCa cohort comprising 40 prostate tissue samples and 8 samples from patients with benign prostate hyperplasia (BPH) as a control as well as 164 and 52 tumour and tumour-free tissue samples, respectively, of prostate cancer patients after radical prostatectomy. Using the Quick Amp Labeling Kit (Agilent) cRNA was synthesized from 200 ng total RNA, and 1650 ng cRNA were hybridized on the arrays (Agilent Gene Expression Hybridization Kit).

### Analysis of RNA Custom Microarray Data:

[0147] Differential expression analysis in the validation cohort was only conducted for patients not included in the exploration cohort (164 PCa patients and 39 BPH patients). Differentially expressed probes were identified by using R v3.2.2 and the Bioconductor package limma v3.24.15. Quality control of arrays was performed by checking distribution of “bright corner”, “dark corner” probes, and relative spike-in concentration versus normalized signal. To retrieve a set of probes mapping to unique genomic positions in hg19 BLAT v35 with the parameter -minIdentity=93 was used. All probes mapping to more than one distinct genomic region were discarded. Normalization between arrays was done by using quantile normalization. In order to reduce the number of tests non-specific filtering was applied as follows: The expression of a probe must be larger than background expression in at least 20 arrays. Background expression is defined by the mean intensity plus three times the standard deviation of negative control spots (Agilent's 3xSLv spots). In addition, a probe must exhibit a nonspecific change of expression of at least IQR greater than 0.5. Finally, a linear model was fitted using the R package limma and reliable variance estimates were obtained by Empirical Bayes moderated t-statistics. False discovery rate was controlled by Benjamini-Hochberg adjustment.

### Validation by Quantitative Real-Time PCR

[0148] For validation of the results obtained by next generation sequencing and microarray screening were analysed using quantitative real-time PCR. cDNA was synthesized from 100 ng total RNA using the High-Capacity Reverse transcription kit (Applied Biosystems) and random primers according to manufacturer's instructions. Subsequent PCR assays were run using 4 μl of the diluted cDNA. Quantitative real-time PCR was performed using custom- and pre-designed TaqMan Gene Expression Assays (Applied Biosystems) for reference and biomarker transcripts on an Applied Biosystems 7900HT Real-Time PCR System. The tested biomarkers and reference genes are listed in table 2 and the used primer and probes are listed in table 3.

[0149] All samples were measured in triplicate and the means of these measurements were used for further calculations. All samples were checked for sufficient quality using the above described QC filters. Only samples that passed QC filters were valid and suitable to be included into the final analysis. The first QC filter tests for sufficient amount of cells in the sample, while the second QC filter confirms that the amount of prostate cells in the sample is sufficient. This was further combined with evaluation of amplification quality, to ensure that replicate measurements of a sample are reproducible and consistent and that the amplification satisfies the minimal standards of the MIQE guidelines.

### Validation in DRE Urine Samples: DRE Urine Sample Collection and RNA Isolation

[0150] Urine samples were collected after digital rectal examination (DRE) of the prostate (DRE urine). This routinely performed examination method allows getting urine samples that contain a certain amount of prostate cells. The DRE urine samples were centrifuged and washed two times using PBS. The resulting cell pellet was resuspended in 700 μl Qiazol. Total RNA was isolated using the miRNeasy Mini Kit on the QIAcube (all from Qiagen) with manual subsequent DNase I digestion. RNA concentration was determined using a Nanodrop 1000 (Peqlab). RNA integrity was verified on an Agilent Bioanalyzer 2100 (Agilent Technologies, Palo Alto, CA).

### Quantitative Real-Time PCR Screening of DRE Urine Samples

[0151] cDNA was synthesized from 2×50 ng total RNA using the Superscript Ill Reverse transcriptase (Applied Biosystems) and random primers according to manufacturer's instructions. Subsequent PCR assays were run using 4 μl of cDNA. Quantitative real-time PCR was performed using custom and pre-designed TaqMan Gene Expression Assays (Applied Biosystems) for housekeeping (PSA) and target transcripts on an Applied Biosystems 7900HT Real-Time PCR System. All samples were measured in duplicate and the means of these measurements were used for further calculations.

### Genome-Wide Long-RNA Next Generation Sequencing of DRE Urine Samples

[0152] For genome-wide long RNA sequencing total RNA from 11 DRE urine samples was precipitated using ethanol to concentrate the RNA amount and resuspended in 10 μl RNase free water. The rRNA removal was performed with 4 ng of total RNA using the Low input Ribo-Zero rRNA Removal Kit (Epicentre, modified by Clontech), resulting in 10 μl rRNA depleted RNA. Sequencing libraries were prepared from 8 μl rRNA-depleted RNA using the SMARTER stranded RNAseq Kit (Clontech). The di-tagged cDNA was purified using the Agencourt AMPure XP System Kit (Beckman Coulter). PCR was carried out through 18 cycles to incorporate index barcodes for sample multiplexing and amplify the cDNA libraries. The quality and concentration of the amplified libraries were determined using a DNA High Sensitivity Kit on an Agilent Bioanalyzer (Agilent Technologies). Samples were pooled and cluster generation was performed using 15 pmol/I of the pooled library and the TruSeq PE Cluster Kit v4 (Illumina Inc.) in an Illumina cBOT instrument following the manufacturer's protocol. Sequencing was performed using the HiSeq SBS v4 sequencing reagents (250 cycles) on an Illumina HiSeq2500 sequencing machine (Illumina, Inc.). The details of the sequencing run were as follows: paired-end sequencing strategy; 126 cycles for Read1, 7 cycles for index sequences, and 126 cycles for Read2.

Statistical Analysis of the qRT-PCR Results from DRE Urines

[0153] For relative quantification, changes in gene expression of each sample were analysed relative to the average expression of the gene within the same run. Data normalization was carried out against the general reference genes as listed table 4: EMC7 (SEQ ID NO: 74-77), RAB7A (SEQ ID NO: 78-95) and VCP (for SEQ ID NO: 96-131). Measurements were calibrated between different runs by calibrator samples from pooled positive control samples of patients with diagnosed benign prostate hyperplasia (BPH) or with diagnosed prostate cancer.

[0154] After normalization and calibration, relative expression levels of the biomarkers were compared between tumour and control samples employing Mann-Whitney U tests. Receiver-operating characteristic (ROC) curves, representing a measure of diagnostic power of each marker by the area under the curve (AUC), were calculated using the package pROC. Variable selection was done by variable importance by random forest and stepwise model selection (logistic regression: top-down by AIC). Final model were trained by logistic regression and ridge logistic regression. All statistical analyses were carried out using R statistical software.

### Results

[0155] The transcriptomes of 40 PCa tumour samples and 16 tumour-free samples obtained upon RPE and 8 BPH prostate tissue samples as benign, non-tumour controls were analysed using strand-specific, paired-end long RNA next generation sequencing (NGS). Approximately 150 cryosections per sample in at least three segments were prepared, aiming at an optimal data quality and robustness of the analysis. Upon pathological evaluation, only segments satisfying a maximal and minimal tumour cell count of 60% and 5% in tumour and tumour free samples, respectively, were retained for further analysis. The transcriptome sequencing (RNAseq) approach aimed at a comprehensive identification and quantification of RNAs expressed in normal or cancer prostate tissue. All classes of coding and long non-coding transcripts independent of polyadenylation status were sequenced. Large input masses of RNA were used to ensure high library complexity. Furthermore, on average 200 M paired-end reads 2×100 nt per library were sequenced, enabling the assembly of novel lowly expressed transcripts due to high coverage. This approach outperformed most comparable published studies that analysed larger numbers of samples. In total, approx. 3000 novel transcripts that did not show an exonic overlap with transcripts annotated in Gencode v17 were assembled. At a false discovery rate of 0.01, 6442 differentially expressed genes across all contrasts were observed.

[0156] The results successfully reproduced the majority of transcripts previously reported to be differentially expressed between prostate tumour and normal tissue. In addition, a number of novel PCa-associated transcripts were identified, which can be used to develop assays for the diagnosis of PCa. The most promising transcripts were selected for validation in a test cohort of PCA tumour and BPH control samples by qRT-PCR.

[0157] Several of these novel biomarker candidates significantly surpass the specificity and sensitivity of the biomarker PCA3, which is already used for PCa diagnosis. In the sequencing cohort, PCA3 proved to be clearly associated with PCa, yet with a strong tendency to a decline in the high-risk group (FIG. 2).

[0158] The experimental results demonstrate high specificity and sensitivity of the novel biomarkers for the detection of PCa. As shown in FIG. 3 which compares the differences in expression levels of various PCa biomarkers between PCa samples and BPH control samples, results for both the newly identified biomarkers (ProstaCheck) and previously established biomarkers (SelectMDx and PCA3) are shown. FIG. 3 clearly indicates that a more pronounced difference in expression levels between PCa samples and control samples could be observed for the newly identified biomarkers as opposed to the previously known biomarkers. Therefore, assays can be set up based on the measurement of these newly discovered biomarkers alone or in combination (or in combination with other markers) in all sources that may contain prostate tumour cells or parts thereof (including vesicles like exosomes, microvesicles, and others as well as free or protein-bound RNA molecules deriving from prostate tumour cells) to be used for the diagnosis of PCa. As shown in table 1 these new assay provide superior diagnostic reliability.

[0159] The advantages of a diagnostic assays based on these biomarkers allows a dramatically lower false-positive rate compared to current assays and measuring their expression levels in urine sample avoid having to perform unnecessary invasive prostate biopsies.

### Sequence Listing

[0160] The sequences of the sequence listing are filed separately. Below table 6 discloses the Ensembl transcript IDs or Ensembl gene IDs, when no known transcript variant was available, which are represented by the individual SEQ ID NOs.

TABLE 6
Association of SEQ ID NOs of the invention
and Ensembl transcript variant/gene IDs

| SEQ | | Gene- | Ensembl transcript variant/gene IDs |
|---|---|---|---|
| ID NO | Biomarker | symbol | (Gencode V41) |
| 1 | PCaD2 | CPNE4 | ENSG00000196353: chromosome: |
| 2 | PCaD4 | | GRCh38:3:131533555:132285410:−1 |
| | | | DNA |
| 3 | PCaD11 | TAPIR | ENST00000366424.2 |
| 4 | PCaD32 | KLK3 | ENST00000601503.5 |
| 5 | | | ENST00000596185.5 |
| 6 | | | ENST00000326003.7 |
| 7 | | | ENST00000422986.6 |
| 8 | | | ENST00000601349.5 |
| 9 | | | ENST00000595151.5 |
| 10 | | | ENST00000597286.5 |
| 11 | | | ENST00000596333.1 |
| 12 | | | ENST00000597483.5 |
| 13 | | | ENST00000593997.5 |
| 14 | | | ENST00000595392.5 |
| 15 | | | ENST00000595952.5 |
| 16 | | | ENST00000360617.7 |
| 17 | | | ENST00000598145.1 |
| 18 | | | ENST00000601812.1 |
| 19 | PCaD42 | HOXB13 | ENST00000290295.8 |
| 20 | PCaD50 | PCAT14 | ENSG00000280623: chromosome: |
| | | | GRCh38:22:23536881:23547797:1 |
| | | | DNA |
| 21 | PCaD52 | CPNE4 | ENST00000514439.1 |
| 22 | | | ENST00000617767.5 |
| 23 | | | ENST00000512055.5 |
| 24 | | | ENST00000429747.6 |
| 25 | | | ENST00000515418.1 |
| 26 | | | ENST00000503204.1 |
| 27 | | | ENST00000512332.5 |
| 28 | | | ENST00000511604.5 |
| 29 | | | ENST00000502818.5 |
| 30 | | | ENST00000505881.5 |
| 31 | | | ENST00000514999.5 |
| 32 | | | ENST00000505957.1 |
| 33 | | | ENST00000506687.5 |
| 34 | | | ENST00000505331.1 |
| 35 | PCaD54 | MSMB | ENST00000581478.5 |
| 36 | | | ENST00000582163.3 |
| 37 | | | ENST00000663171.1 |
| 38 | PCaD58 | FOLH1 | ENST00000256999.7 |
| 39 | | | ENST00000458311.6 |
| 40 | | | ENST00000356696.7 |
| 41 | | | ENST00000525826.5 |
| 42 | | | ENST00000340334.11 |
| 43 | | | ENST00000533034.1 |
| 44 | | | ENST00000532018.1 |
| 45 | | | ENST00000525629.1 |
| 46 | | | ENST00000526226.1 |
| 47 | | | ENST00000529646.5 |
| 48 | | | ENST00000533510.5 |
| 49 | | | ENST00000529117.1 |
| 50 | | | ENST00000529648.1 |
| 51 | PCaD91 | KLK2 | ENST00000593493.5 |
| 52 | | | ENST00000595375.5 |
| 53 | | | ENST00000597509.5 |
| 54 | | | ENST00000596950.5 |
| 55 | | | ENST00000600690.5 |
| 56 | | | ENST00000599280.5 |
| 57 | | | ENST00000594174.5 |
| 58 | | | ENST00000391810.6 |
| 59 | | | ENST00000597727.5 |
| 60 | | | ENST00000595316.5 |
| 61 | | | ENST00000599121.5 |
| 62 | | | ENST00000325321.8 |
| 63 | | | ENST00000600755.5 |
| 64 | | | ENST00000600866.1 |
| 65 | | | ENST00000358049.8 |
| 66 | | | ENST00000597439.1 |
| 67 | | | ENST00000601743.1 |
| 68 | | | ENST00000599568.1 |
| 69 | | | ENST00000595173.1 |
| 70 | | | ENST00000601114.1 |
| 71 | | | ENST00000595050.1 |
| 72 | | | ENST00000597911.1 |
| 73 | | | ENST00000597461.1 |
| 74 | PCaD92 | EMC7 | ENST00000256545.9 |
| 75 | | | ENST00000527822.5 |
| 76 | | | ENST00000528949.1 |
| 77 | | | ENST00000532113.1 |
| 78 | PCaD93 | RAB7A | ENST00000676214.1 |
| 79 | | | ENST00000676425.1 |
| 80 | | | ENST00000675712.1 |
| 81 | | | ENST00000675864.1 |
| 82 | | | ENST00000490093.6 |
| 83 | | | ENST00000675342.1 |
| 84 | | | ENST00000493186.6 |
| 85 | | | ENST00000674748.1 |
| 86 | | | ENST00000265062.8 |
| 87 | | | ENST00000482525.5 |
| 88 | | | ENST00000491681.1 |
| 89 | | | ENST00000675497.1 |
| 90 | | | ENST00000674589.1 |
| 91 | | | ENST00000464496.5 |
| 92 | | | ENST00000483906.5 |
| 93 | | | ENST00000485280.1 |
| 94 | | | ENST00000676147.1 |
| 95 | | | ENST00000674593.1 |
| 96 | PCaD94 | VCP | ENST00000679902.1 |
| 97 | | | ENST00000678650.1 |
| 98 | | | ENST00000678018.1 |
| 99 | | | ENST00000679800.1 |
| 100 | | | ENST00000677257.1 |
| 101 | | | ENST00000678465.1 |
| 102 | | | ENST00000681537.1 |
| 103 | | | ENST00000358901.11 |
| 104 | | | ENST00000448530.6 |
| 105 | | | ENST00000679647.1 |
| 106 | | | ENST00000681335.1 |
| 107 | | | ENST00000417448.2 |
| 108 | | | ENST00000680916.1 |
| 109 | | | ENST00000679599.1 |
| 110 | | | ENST00000679862.1 |
| 111 | | | ENST00000681690.1 |
| 112 | | | ENST00000679204.2 |
| 113 | | | ENST00000676836.2 |
| 114 | | | ENST00000493886.5 |
| 115 | | | ENST00000479300.2 |
| 116 | | | ENST00000466100.1 |
| 117 | | | ENST00000480327.2 |
| 118 | | | ENST00000681125.1 |
| 119 | | | ENST00000680834.1 |
| 120 | | | ENST00000680520.1 |
| 121 | | | ENST00000681789.1 |
| 122 | | | ENST00000680731.1 |
| 123 | | | ENST00000681562.1 |
| 124 | | | ENST00000680079.1 |
| 125 | | | ENST00000679449.1 |
| 126 | | | ENST00000680900.1 |
| 127 | | | ENST00000681386.1 |
| 128 | | | ENST00000679901.1 |
| 129 | | | ENST00000679392.1 |
| 130 | | | ENST00000680108.1 |
| 131 | | | ENST00000680575.1 |
| 132 | PCaD30 | PCA3 | ENST00000412654.1 |
| 133 | | | ENST00000644302.1 |
| 134 | | | ENST00000645809.1 |
| 135 | | | ENST00000646854.1 |

| | |
|---|---|
| 136-177 | Primer and probe sequences as disclosed in table 3 |

### CITATIONS

[0161] Aubin S M J et al. J Urol. 2010; 184:1947-52.
[0162] Yoav Benjamini and Yosef Hochberg. Controlling false discovery rate: a practical and powerful approach to multiple testing: Journal of the Royal Statistical Society 1995.
[0163] Cucchiara, V., Cooperberg, M. R., Dall'Era, M., Lin, D. W., Montorsi, F., Schalken, J. A. u. Evans, C. P.: Genomic Markers in Prostate Cancer Decision Making. European urology (2017)
[0164] Duffy, Michael J. “Biomarkers for prostate cancer: prostate-specific antigen and beyond” Clinical Chemistry and Laboratory Medicine (CCLM), (2020)
[0165] Gleason, D. F. (1977). “The Veteran's Administration Cooperative Urologic Research Group: histologic grading and clinical staging of prostatic carcinoma”. In Tannenbaum, M. Urologic Pathology: The Prostate. Philadelphia: Lea and Febiger. pp. 171-198.
[0166] Guescini M, Sisti D, Rocchi M B, Stocchi L, Stocchi V. A new real-time PCR method to overcome significant quantitative inaccuracy due to slight amplification inhibition. BMC Bioinformatics. 2008 Jul. 30; 9:326. doi: 10.1186/1471-2105-9-326
[0167] Haese A et al. Eur Urol. 2008; 54:1081-8.
[0168] Irshad S et al. Sci Transl Med 2013; 5:202ra122.
[0169] Jansen F H et al. Eur Urol. 2009; 55:563-74.
[0170] Jansen F H, van Schaik R H, Kurstjens J, Horninger W, Klocker H, Bektic J, et al. Prostate-specific antigen (PSA) isoform p2PSA in combination with total PSA and free PSA improves diagnostic accuracy in prostate cancer detection. Eur Urol 2010; 57:921-7.
[0171] Lendínez-Cano G. Prospective study of diagnostic accuracy in the detection of high-grade prostate cancer in biopsy-naïve patients with clinical suspicion of prostate cancer who underwent the Select MDx test. Prostate. 2021 September; 81(12):857-865
[0172] Moyer V A et al. Ann Intern Med. 2012; 157:120-134.
[0173] Salagierski M et al. J Urol 2012; 187: 795-801.
[0174] Thompson I M et al. J Am Med Assoc. 2005; 294:66-70.
[0175] Van Gils M P et al. Clin Cancer Res. 2007; 13:939-43.
[0176] Vickers A J, Cronin A M, Aus G, Pihl C G, Becker C, Pettersson K, et al. A panel of kallikrein markers can reduce unnecessary biopsy for prostate cancer: data from the European Randomized Study of Prostate Cancer Screening in Goteborg, Sweden. BMC Med 2008; 6:19.

The application's sequence listing, which the Patent Office published only in electronic form, follows.

SEQUENCE LISTING (177 sequences)

SEQ ID NO: 1 - DNA, 751856 bp, Homo sapiens
  source 1..751856: mol_type = genomic DNA
acaccagcggctggacattgagaggatcacagcagtggaaaaagacacaagcacctagccgttgagaggaacgcactggcctaagaacatactgacagacgccggtaggccagcagggcggcaggccatcaacccgcggaaggacacggactttggccagggcggtataaggtaagccccgctgctgggcggcctggctccaggggaaagcaaccttccattccatctcccttctggctcccccatctactgagagctacttccactcaataaaccttgcactcattctccaagcctacgtgtgatctgattcttctggtacaccagggcaagaaaccccatgatacagaaagccctctgtccctgcgataaggcagggtgtctgattgagctgactagcacaagccgcctacggacggctaaactgaaagagcaccctgtaacacaggcccactggggcttcagctgtaaacattaacccctagacactgctatggggtcggagcctcacaacccgaccgtctgtctgtatgctccccctagaggtgtgagcagcggggcactgaagaagcgcgccacacccccgtcacacgccctgcgaggggaataagggaacttttctcgtttcaaaactgctaagccgttctttgctattcggacatacccgaagaccaccaggtctgtatgtatggcccaaattgcaattctttcttcccaaataaaatattaaatttatggattcatctctacatgtttattttgactttgatataattatatgagaaaggtactattattaactctcattttatagttgaggaaattaaggctcagaaagattaagttgctcgtctaaggtcacatgacagaaacggagcagggatccctcttagggcccccctcccccccttgccaagcatggaaatagaggaaaatattgagttccttccggggaaattctaggcagtgaactagccgcctcactagccctgagaagtaaataagcaacttgataagcaagaagataatagtagctgaaaacaatagccaaggtagttagagtcctgagatgtttggttccctatagaaactaaagacaacatctcaacatatgtccctgagctacttttcagaaacacagaccccagccaaatggatccactggcatgtagacctcagataaggggcgattgagaactgaactctgactgccgttcttttttctaaacttcttccttaggagcctaaaggacgtcatacccatgggccagacctaacattcctttctgctgatcccaagtttttagacaaagtttcccttccttaaccaattgcgaatcagaaaatcctcgaatccaccaatgacctgtaagttcctgcttcaatatatactgtctttttaggccaaatcaatatataacctccacatatgccttaaaattctgcctgtaacttctacttccctgaaatttatccctgcttttaaaaactcttgcttgtaagctattgcgaaggttggctcttacagtgtgagctgcctgattctccttgcttggtgccctgcagataaatgccttcttttcccccctgctgcaaaaccttggtgtagatgtttggctttactgcactgagtgagcagaccctggtttggtttggtaacatgacttaaaaattacaaagaaaaggaacaggaacacagctctctggtcctctggtatttagagctgaaacagaggaggaggggcctgaaaacatgaaggcagaacttagaagggaaacaggagagtgtagtgttgcagaagcttggtggagagagtatttcaatgaggaagtggtcagcttttttgaaagccctgagtgtttgctgaagaaagacagagacagagaagtgaccactggatttggcaagatgaggtcgtgttgagtctgatgggaacagtgcctgtggagtggtggagatggaagtacaatcacaactgattgaaaaaggagtgggagctgaagatgtaaaagtagtaaccaccaagaactctttgggaaaaattagctaagaaagggagctgaaaactgggagggggatggaggagatttgaagttgtgtgtgtattcaagtattaattttgtatgatgataaataaagagtacagaggtgggcacatcagctcatgcccataatactggcgctttggtaggtcaagccaggaggattgattgagcccaagatttggaggccagcctgggcaacatagcaagaccctgttcctaaatttttttttttttaaattagccaagcatggtggtgtatgcctatagtctcagctactctggagactgaggcagaagaggatcacttgagcccaggagttggagaccagcctgggcaatatagcaagaccttgccttttaaaaagtgggggaaaaaaaaaaaaaaggaaggcattttgttcctgactacctgcctcacccattactttcatgttcctggaatttttgatatgaagaacaatgtatagcctatcagtagcttatgtgattttaatataaaatacttggtaagcaacttaggaactgcttcttctttttctttagaaacctacttgtaactgtagctaatcagagcatatattcagggcaacttaaatctatgttcacaagttgcagtcttcaaacttggtccaaataaaatctctacttacgttaagttggcctcaattttttcctttaggttgacattcctttgatcttttaatatgttgaatttttaaatttcttcattgaatccttgatcattttgcattttttttaatagatgttttctttttccattattttattttggatttttaaatagtgttcataaaatattggtctatagttttctgtgttattattttcagattttggtgtcaaagttatactggttttgtaaatactgattgaatagcctttttcccttatgctttggaactattttaataacactggcaagctttgttccttgtagatttgaccgaagttgattgaagccctctgtgaaattgtctgaatttagtgtttttaaaagggtaaccatttgatcactttctcagtttctttgtagtattttgtgtccttggttttgtccatctcttttgctgtcatttttggtaaattaacttacatttagtataaacttgtaatttatattaaaataatctatttcatccagtttttataatcttttaaaattccctttatgtgcatgtatatttttctcacttctaaatgtgttcattttgtattgccttttaaaaattatattagccagttaagctacctatttcattgtttttctaagattcagttcttagatgtatttattagtcctgtctctctgttttttttctgtaattcatggttttttactttcatctttcatgtttcttttggtttactttagctttcttcttctaaaatgttttgatttaaaagcttaatttaaaagctttgtcaacaaaaagagtcaaactctataaaatatttgaagagatttattctgagccaaatatgagtgatcatgacctgtgacacagccctcagccctcagaaggttggggtgcagcttggttttatacattttaggcgggcatgagacatcaatcaaatacatgttagaaatacattggtttgatccagaaaaatgatacaactcaaagtcaggggtgtgggattccaggctataggtaaatttaaacattttctggttgacaattggctgagtttgtctaaagatctgagactgacagaaaggaaatatttgggttaagataaaagattatggaggccaaggttcctttgaagtcttattgtggctgcccttagagataatagatggcaaatatttcatattcagatctttaaaaggtgctaaacttttagttaatctctaggattgggagggcctggaagaaaaagatctagttacgttaacagagattctttacagacacaaattttcccccacaaaggacagctttgcagggccatttcaagatatggcaaataaacatgttttggggtgaaatatttcaattttcttccttgtctcataatgttatgctagagtcaggttggaaagccacgatatatagggttaaataaaacccatctgatgagaacttatggtttatagggcatgactcctcagactctttagatgggaatttgggcaagataaaaaaatcagtttagtcctcaactctttattggttaatattaaaaatgtttaaagttatgaattttttctcatggtttttgaggtttcccatagtttctcatgcattgtgattttattgttattttctaaattatttacaattcttttctttttccatgtcagatgggtaatgtgcggatgtggtaaaaaggtttaaaaaaggctgccgggcacggtggctcacgcctgtaatcccagcactttgagaggccggggcgggtggatcacgaggtcaagggttcaagaccagcctgaccaagatggtgaaaccccgtctctactaaaaatacaaaaaattagccaggcatggtggcgggtgcctgtaatcccagctacttgggaggctgaggcagagaaatgcttgaactcgggaggcggaggttgcagagagccgagatcacgccactgcactccagcctgggagacggagcgagactctgtctcaaaaaacaaacaaacaaaaacaaaaaaaaagaaaggcacatctcacacatgaacgtgaaaacccagtaatcactgttatgaactacaaaaggatctatttactttacttgatttgaattttttctgaaacaaattcagagagagttttaaagttttttggctgtaggacactttttttatttttattaattttcaaagataagctacagtcttactgtaattaaatttttacctatttctcattacatttttagaagttgttgacttatggatttagatgctgcataaaaatttacaataattaaatcttcattgtagacaggggcatttatcttgatatagtgaccatttttataattttttttctcctaccaaagtggcaaactttccccggttaacacatagataagccttttctttgtattattatatatatatatatatattctaatcttcctcccattttgagactgtccctcatcaaaacaacctacatcccatagtggtatggtttaaatgtaccctttaaaactcacattgaaacttaatccccagtgtgacagtattgagaggtggggtctttaagacatgattgaattctgggtgtggtggctcacacctgtaatcccagcaccttggggggctgaggtgggaggatcacctgaggtcaggagttcaagaccagcctgaccaacagggtgaaaccccatctctactaaaaatacaaaattagctgggtaagatggttcatgcctgtaatctcagctactcgggaggctgaggcaggagaatcgtttgaacctgggaagcagaggttgcagtgagccgagattgcaccgagccgagatcgcaccattgcactccagcctaggcaacaagagcaaaactctgtctcagagaaaacaaaaaaagacatgattgcatgaggactctccctcaagaatggaataatccatccatggactaatgggttaatggattattatgttatcatgggaggggaactggtggctttataagaagagaaagagagacctgagctcatgctcagcacctttgccatgtgatatcccgtgctgcctcgggactctgtaaagaagtccccagcaagaaggctgtcactagatgcaacccctcgaccttggacttagcctcctgatctgtagaaaataaattccttttctttataaaatacacagtttcaggtattctaagcaacacaaaatgaactaagatgtaataaacaaccagatgaatttataatttctacagtttgatccacagcttcaattacaatgttagagtttcagatgtttttagatcctttcttagcacaaaggaaaatgtagaatgtggaggaacatattcctcataaaaccaaccaataaaacttacaaacgtataacttggacaacagagggagcagaaggctgctagctagaggttttcttaaagaatcccctggggagctggtaagaaattcatgctcctggaatctcaagatttggaaggttcagtggaagcagaaatgggaatttcaagcaagtactacaagtgatgttgctgaagacccatgctgacccccttaaacactactgtagggaaaggtttctcatctattacctcctcaggaaagaaacacttaaacatcaggaacacgtattaactattttttgggaaacttgaggctatgttaacataagaaattggcctggcacagtggctcatgccagtaatcccagcattttgggaggccgagacaggtggatcacctgaggtcaggggtttgagaccagcctggccaacatgatgaaaccccgtctctactacaaataccaaaaattagctgggcgtagtggtgggcacctgtaatcccagctactaaggaggctgagacaggagaattgcttgaacctgggaggcggaggttgcagtgagccgagattgcgctgttgcactccagcctgggcaacaagagtgaaactccatccaaaaaaaaacaccacaccaaaaacaaaaaacaaaaaaacccataacaaattagctttaggtgaatgtttgtcttttttcttttttcttccagagagactcaatttactaggctgatgttgctgtctttcttctctccctccctcttcccctattttgccctttatattagtttcctggggcttcgctaacaaagtaacacaaaccgggtggcttacataacagaatcttggttttaatatagagtattaaaagccagaatttcctgaatataaagctggtatttctttcttttctttctttcttttttttaaaccatcctgctatatctctgctaaaaggtatgtgtgagccaaaagtttaaagaaatggcaattttatatcttggtattttaattatcgacaaataacattgttgtctatcatgtatttatttaacaagtatttaatgaaatctgaaatatactgtcgggatcaagagcttggccctctgatagttcattgaaaaatcaactcacaataaggcagataatcagagaaaggtcatacaaatttatttaacgttatacaaaagagcctacagaatgaagacccaaagataaaggggaaattgcccatttttatgcttaggttcaacaaagtatggacagctgtgtagagctatgattggacaaaaagggtaagatctcctgctaatggactgagtgggaaaccaagcaaagtctgcctagattcttcttggcctctctgagcattcagtcctttcttctggctatggggctggcccctctctgcaatgggggtcttatgactaaaaccacctatgcaaaattataactgagggaattatgacagttgttagaaataccaaaattgttagaaataattggtgtggcaaagaaaagtcagcacagagacaaaagatctcccagcaaggcaatctttactttctgcagaaagggtgctcaatcgcagatggaacaatggtgagagcacacctgaacaaaggaaaagcggacatatttatcccttgtacatttggatcgtccttactgctgtgtccggcatccattggctggagctgaacctcacaatcttttttttttttttttttttttttttttttttttttttttgagacggagtctcgctctgtcgcccaggccggactgcggactgcagtggcgcaatctcggctcactgcaagctccgcttcccgggttcacgccattctcctgcctcagcctcccgagtagctgggactacaggcgcccgccaccgcgcctggctaattttttgtatttttagtagagacggggtttcaccttgttagccaggatggtctcgatctcctgacctcatgatccacccgcctcggcctcccaaagtgctgggattacaggcgtgagccaccgcgcccggccgaacctcacaatcttaaactgatacccgatttgctaatagcctaaaactttcctaaataggtaagtgcaaggaagaacaaagaagttgcttacaaaaggtttaaggaagcaataacatttccaaataaggaaggggcatagactgtgagctggaacatgcttgtgagcatgtccaacagttacataggatagggcttaacaaagagttattagcacaaagcaaggaggcttgaagaaagttagtctttacaagaaactgccatttctaacacttatgatttattctttaacaagatggggaactttgaagaggaaactttttactttctacaacagaaagaaatcagacctaaccgactccatcttgcttctaacctttaagctgtccttgttcactcctggggataggccgaactgactttgggaaggaattcagttcatggtttgacttagcggtcatgcaacctggctccaagagtctgaacctccccaaattgctcctgggggtaacatcactattgtgaaacctaagatcaatgctggagatattttgcagaccctgcactggctggatcagctgacaccactcagacctggctcaaccagttctgccatcccacccagtaacagaaaacagcaagaaaaactcacttcaaccctctaggattccatctccaacctgaccaatcagcactccccactttgcaaccccctgccgaccaaattatctttaaaaactctgatccactgaatgctcagggagacctatttgaataatcataaaactccagtctcctgcacagctggctctgtgtgaattactctttctccactgtaattccaatcttgataaatgggctctgtctaggcagcaggcaaggtgaacacattgggcagttacatgacctgtagtcaaacaaggcaagtcagataatttctctatggacggggtttttttttttttttttaggtggagccttgctctgtcaccaggctggagtgcagtggtgtgatcttggctcactgcaacctccaccttccgggttcaaatgattcccctgcctcagcctcccgagtagctgggactacaggtgcatgccaccatgactggctatgtggccaatttttacacagaaaaacagagagaaaattagagtaatatttttaggttttatggctggcattgcggaaaaggggttctggtttctatgaaccgccttggggaagagggataataatttctatggcccactttaaagttcatatggaaccaaaaaagagcctgcattgccaagtaaatccaatcctaagccaaaagaacaaagctggatgcatcacactacctgacttcaaactatactacaaggctacagtaactaaaacagcatggtactggtaccaaaacagagatatagaccaatggaacagaacagagccctcagaaataacaccgcatatctacaactatctgatctttgacaaacctgagaaaaacaagcaatggggaaaggattccctatttaataaatggtgctgggaaaactggctagccatatgtagaaagctgaaactggatcccttccttacaccttatacaaacattaattcaagatggattaaagacttaaacattagacctaaaaccataaaaaccctagaagaaaacctaggcattaccattcaggacataggcatgggcaaggacttcatgtctaaaacatcaaaagcaatgtcaacaaaagccaaaattgacaaatgggatctagttaaactaaagagcttctgcacagcaaaagaaactaccatcagagtgaacaggcaacctacagaatgggagaaaattcttgcaacctacttatctaacaaagggctaataaccagaatctacaatgaactcaaacaaatttacaagaagaaaacaaacaaccccatcaaaaagtgggcaaaggatatgaacagacacttctcaaaagaagacatttatgcagtcaaaaaacacatgagaaaatgctcatcatcactggccatcagagaaatgcaaataaaaaccacagtgagataccatctcacaccagttagaatgtcaatcattaaaaagtcaggaaacaacaggtgctggagaggatgtggagaaataggaacacttttacactgttggtgggactgtaagctagttcaaccattgtggaagtcagtgtggtgattcctcagggatctagaactagaaataccatttgacccagccattccattactgagtatatacccaaaggattataaatcatgctgctataaagacacatgcacacgtatatttattgtggcactactcacaatagcaaagacttggaaccaacccaaatgtccatcaatgatagactggattaagaaaatgtggcacatatacaccatggaatactatgcagccataaaaaatgatgagttcatgtcgtttgtagggacatggatgaagctggaaaccatcattctcagcaaactatcgcaaggacaaaaaatcaaacaccacatgttctcactcataggtgggaactgaacaatgagaacacatggacacaggaaggggaacatcacacactggggcctgttgtggggtggggggaggggggagggatagcattaggggatatatctaatgctaaatgatgacttaatgggtgcagcacaccaacatggcacatgtatacatatgtgacaaacctgcacgttgtgcacctgtaccctaaaacttaaagtataataataataaaataagaaaaaataatttctatggcccactttcgggcagaatgggtctgggagacaggaggtcaggagaagatcagagaaaaaacttttgattctgaggccttcatttgttttctgagcctcaacaatactaggcactgaagtagaagctggtgatatagagaaaaacaaagcacattcactcttgggaaatatttctgagtgaggcaacttaaatcagataaactaataattacctaacttgtgtgtgcccagagtgtgcagaaaagagagaaattagttctgtgtgtacatcttgccctgagcttcataggccttcttcccttgttctctgaaaaactatgtccctcttaagtgaagctaccccagaacttgagattactttcctcacgtgaccataagcttttgtaccaaccttcgttccagccacttacttcttaccttcatataaactattgtttgctctctactccctctgctcttggtatgaactcactgttctgagcaataatctgtgttgtatgccttttggaaaagaacaaagcaggttatttggagagggtgtttctcatgttcccaaatagacccttataaggtcaatctatgttggctccactagtcaagttaaaagaacactgtcctttctggagcatctttgttctttgttcctttacttgagttacatatccataatataagaacactgatcttttgatattcagctaacaaaaatttactgggcatgtgttatgtgcctagatcagttttaagtgctgggtatacagcagtgaatcatgatgataagaatcataacaaaacagaaaaagatcttgtcttcctagagcttatatgagagtggaagaagtagacaatactcaaacataaatctatgatatagttttagatagtaacaagttctatgaagaaacattaaacaggataaagggacagaaacaaaagatgcttagagatatcagggaggtgtctttgaacaggtgacacttaagcagagacctgaataaagtaagggagtaaagtgtggctttctgagagaagagtatagctgtgagtatttgtggaggggagataatctagaaaagaggaaaatatttgattctgctattttgtgttcctggtgttctttgtttctttggtacaactgtggtttgagactggacttcatgggggcctgcttttacatgggttacacgtgatgagctgactgggttgagtgaccctagaagagcgggggaaatttgatcccaggtcttcgtgtattaagtgaagttgtcattccagcaggccctgcagagcgtggaagctcggaatttgaacctgggtaataaatcagctgagttatatggtagatgtcagagatctccattttacttgttaagtagctgcgaagactgagggacattttagaggtgataaaaatgtactgtgttaaagtgacttcccataataggtaatgatacattaagatttttttcctttctgttttaccatatatttttctgatttaaaatttaaagaaaatgttgattaagtgcctttcatgtaccaggcattttacatatgtgtctcatttaatcctcacaataatgaggaaagaaggctcagagaggttaagtaacttgtccaagatcacacagatagtaagcagcagaaccaacattgaaacccaagtcattgaaacttcaaagcctgcttacacaacagagcctttctccggcagggagttttagctaaattagctggtcggacatttccctctgaacttaaagttaaaaagtgtctctcaaaggaggttcctcaaatctttgtattgtattgtgggttgaagcagagggaattaggaatgtttgataggcagctattttctaagttgatcttgaggtaagttcataactttgaagggaagtgccaattgaataataattctcacactacagagatgtcctcttttgaaagataaaggctgaccctgtttgacaatatctctcacatgtgttttttgcatctcctcatcccaactctgcatctattgaacttgaatgaggagccagagagaagatcagattgaggatattatgtcttaagagaattaccacagtttagcttgactaccggcagaatctggatttgagtgtgcaattcaaatacaaatatgttttaagcatctcccgtaattactaattgctcgttcatttcttatattttcatcaatgagtggtgtcatttccccaacagtggtttgaactagaaaccttggtggtgttctagatttcttcatctcctgaatccttgcatattagatagttaccaaatcctgtcaagtcctatttcttagatccagaatctactaaggtgtagttaacatgaatccagagttcagaccccaaactagctacttactagtaagttaatgaacttttgtgcatccatttccttatctttaaataatactgtattagtttccaatgactgttataagaaattaccccaactctggtggcttaaaacaatacaaattcaatgaataacatctagtatttgagagcacaaaagggtgactacaggcaacaataatttattgtacatttaaaaataactaaaagagctgggcatggtggcttacacctgtaatcccagcactttgggagtccaaggcgggcggatcacctgaggtcaggagttcgagaccagcttggccaatgtcgtgagaccccatctctactaaaaatacaaaaattagccgggcatggtggtgcacacctgtaattacagctactcaggaggctgaggcaagaggcagagcttgcagtgaaccgagatcgtaccactgcactccagcctgggcaacagagcaagactccatctcaaaaacaaacaaacaaacaaacaaaaaacaaaactaaaagagtgtaattggtatgtttgtaacacaaagaaatgataaatgcttgaggtgatggataccccatttaccctgatgtgatgattacacattgtatgcctgtattggtctcatgtatcccataaatatacatacccactatgtacctataaaaatcaaaaattaaaaaacccacaaatttattatctcatggttctagaggtcaggagccgaaaataggtctcactgggctaaaattaaggtgttggtagggctgcattccttctagaggttctaggtgaaactgccatttgcttgcttttccatttctagaggctgcctgtattccttggttcatggcccctttctgtccttaaagctagcagtggctggttgaaactttctcacatggcatcactcgaacacagactcttcttcggcttccctctttcactgtaaggagccttatggtttcactgggcccatctgggtaatccgggatactctccctagtttaaaatcaaatgacaagtaaacttcatttcctacacaaccttaattctccttttgcatattgacagtttccagggattaggacatgagcatctttggggacattattctgtctaccatagctacctatctcatagggctattgagaggattcaatgagttttaggctataaagcactttgcacaatgcttagcatgatgtaaataataaatgttatccttattggtgtgagtattagcttatgtcttcagtctctccctctttacccttcatactggactcagagttgtatttcaggagaccggtttcatcctattgtccccatctttagttcttactctgtgtcctcctctgttctcccgctacactgtgttttctatatatcagtttaccattctcgctctctttcttttttttttctctttttttgtgatggagtctcactctgtcccccaggctggagggcagtggtgcaatctcagctcactgcaacctttgcctccctggttcaagtgattctcctgcctcagcctcctgagtagctgggattacaggcatgcaccatcacgcctggctaattttttgtatttttagtagagacagggtttcactgtattagccagcatggctcgatctcctgacttcatgccccaccacccgccttggcctcccaaagttctgggattacaggagtgaaccaccgtgccgggcctctctctctgttttttttttttttttttttctgagacacagtctcactctgttgcccaggctggagtgcagtggtgctatctcagctcactgcaacctctgcctctgcctcctggttcaagcaattctgcctcagcctcccgagtagctgggactacaggcgcactccactgcgcccagcttattttgtatttttgtagagacagagtctcaaacattctgacctcaagtgatcagcccacctcggcctcccgaagtgttgggattacgggcgtgagccaccacacccggcctcaacttactattctctaattgttgacttacctgtcttccaccagaatgtaagtgattgtgtcaaagtatggtgcatgaaccagcaacattggcgtcacttggaaggttgttagaaatgcaaaatctaagcccctgcaccccacccccaaccccacttttgcatcaaatgaatcaaaatttgctttttaacaagatctccaagtgattcacatgtccgttaaagtttgaaaaatattgttctgaaatataactgcctgataaattgtaggcactcaataaatgtttattgaataaaataaaaattacaccaggcacttgtgttagatgggagaagcacagaaataacaggcatggttttccacagctcgttgaatgattctgctcttatatttcttcatgtctttgtatagcctacatgatggtcatctcagaattgtttaaaggtgcaagcttgagctcctatgaaattacaaagaggcatcacatagttcagataggcaaggaatttttaatctgttttgcttaccaccatatcctaacacctgggataatgccaggcatataagcagatgcttcataaatattgttgaatgagtgaatccgtgtgttttttgtttgtttgtttgtttgtttgagatggagtctcgttctgtcgctcaggctagggtgcagtggcacgatcttggctcactgcaacctccacctcctgggttcaagcgattctcctgcctcagcctgccaaatatctgggattacaggtgcctgccactgcacctggctaatttttgtatttttagtagagatgggggtttcaacatgttggccaggctggtctcgaactcctgaccttgtgatccacctgcttcagtctcccaaagtgctggtattacaggtatgagccactgcgcctggctggccatgtgtttctttttctcccagtgggaaacttcaccacaagggggacccatttgcagctcaaatccattcaagaaggtatttctttcaccaaaaagcctcaagatataccatgcttttctccttgttccaccacaggagactgctaatcactaagaacaaacaggcagctgctctggaaagtaaatgtttaaataagaaagagggagagaaagctgcagggtttgtcaccaaagagagaatgtgggagttcagtcaggctggtgggaaaaattttaagatgaaattataggaattaaacacaaaccctcttagaaggcctgggggtttgtgtaaagtgtttggctgaagacagctgaactcccttaaaagcgtagggtgtagatacataggaatatagagtagtttatctaaatagcttgtttactcatgtggtcctaagaccaacctttaatcaaccacgggtgcataatttctgtctactggtggatcggcaaccaggtcaattaccctctaacagtgtttactcaagacctttgtcatttaatccatactgaataaatgtgagctttgttggctgaacggggccacggctgctactctttacagcaccttccttggtatctgtgaggggcccggacccttagccagactgacaagcagaatatatgtgtcagtgtacgttattcatctgtcattgggtcagtgtctgtaggatggacccccgcaagagaagccatttgctggccaacaattcacatagtaagcaggagaattcttcatggcaaaactattggcaaagtctccgttatgaaagtgtccctggaatatacattgaaacaggtattaaaagtacaggttctggtccaagaaaacagggcaggttgtactgggatgaaaacagcataagactcagaagagtggatcagcagatcataaacagtgaaagaagatttgaaatctggtgtaacagttccagtggctaagacttttaccagttccttggtgatgagaaaatggaaattaatgccaaaccaatctcagtagatatggaactgtgtgcctgctactggagctgtgcagtaaactctacatggttctcatgccatagtcattctttttgttgttgttgttttgttcttttttttttttttttttttagatagaaagcgatttgcccactttgacctcccaaagtgctgggattataggcgtgagccactgtgcctggccccatagtcactcttaatgaattgtttgctgttgtcctcaagccctgaattaaactgtacctacaagtatcggcctgggtgaacacaggtgacagatgctcaatgctgagatacaggataactccctgtcctcactggtttaatgatgtttgtttttctctaagaatgtatttgcaatatgtctgcatatccgttctctgcttagagaacactgtgtcttgactctcagctctaagttcacttttatatcttcttttacagccagcataaatgtcaccctttcccaagtctttcctgactctcccaaggagttattttgacactatctctgccatcccatagcctttgtacttacctctcttataatacagttacttatttacctgatcatctctctagataaactgccaactactacagctataggctgcacctgattctcctttaatcttcctcctgactcccagaaatcaccagcatgtagtaggcacctgtaaatgctcgtaagtagaccttggtctcatcaccaggacaggcagccaagcctcactggttcttggaagatgttagttaagggacagttgacttgctgtgggcaaacatctggcctttaattatttagctggttaaatagactgtgattgtctctggttggtagttgctatctttttttacaggagaaatcaatctgctgatatatcagttagaagacaatgttatagataatgcttatacatggtgacctagttgccaactgcattgtataagctaacagtatcataacactttggattagaaaacttattatcattattattaagaaatcatttcaatttttattgctggaaggacttcatctggaatagaggcccaactaaaatgaatcaaaattctgcctttagaaagctattcagcttaatcattttgaagacatgccaatggcaaactacaaatttaactaagggtattatgtttcctccctctttttttcccttctttctttctctctcttctctctctcccttttttcctccctcccttccttctttcactctttccttccttccttttcctcagatatttattgagcacttacactttgacaagtttttttttttttttttttgagacagagtttcactcttgttgcccaggctggagtgcaatggtgtgatttcagctcactgcaacctctgcctcctgggttcaagcaattctgctgcctcagcctcccgagtagctgggattaaaggcatgtgccaccgtgcccggctaattttgtatttttaatagaaacggggtttctccacgttggtcaggctggtcttgaactcctgacctcaggtgatctgtctgctttggcctcccaaagtgctgggattacaggcgtgagccactgtgcctgacttgacaggtcttttttaggcataagagataaaaagtaaaggagccataaccccctgactcccagttgctttctttctagggcttttcatttggaaaaaaggagagagaagagggagactttgaaatttgtaaaaatgaattaagagcaagagttggcagctagtgatcagctttgcaccagttgagacagcactaaaagggtaaaatgttacatcagatagtaaaattcattatttaattgccataaatctagactgtattaattgctcttactatatttatattgtatcaaatgaatacaagatgtggcccctgtccttgggaacttcatcattagagttatatcttttatggaaatataagttctttgtcaacatgatgaaaggctagcatttttatgtctatggaaatgctggaggaaacatggttctaagggtttgcctttctagtctagatcagtaattctcaacatgccatccccaaacttccagcattattgtcaattgggaatttgttaaaaaggcaaattattaggcccaagtcagagctactgaatctgaaactctggggcagcaatctatgctttaacaggctttctctctgtaattctgatgcatgcccaagtgtgactgagaaccactactccagtcttgacccttgatatgcatagtgtggtccctggaccagcagcagtcgctcggagcttgttagaaatgtaaagtctcaggccccagtccaaacctactaaatcagtatttgcactttaccaagattctcatgcgatttgtaagcacattgtattttgcaaagcactgctctagactagattatcccttgaagggcattgagccagagccagtctatgactcctcccatttcagccatcaaagcactgaagtagaaggtaacaggctgttccttccacttccctcagcacttgagtgtcattatctagaattggcattttgcaaatttggacaacattgcagtttctacagagaagactctgctcctgtccatgaagactgggagaggtaccatatgaaatataatcagtttgctagtaccaacagattgctattaaaatcatttcagtgtcagatttcccctttcttaagatataattaggttttctgtctggaggagggataatacagtttccaatgtaagtgggtcaaacagatttacaaaataatgagtaataggagaaatttggaatttctcagcctggtattactttggtatcaggaagggccagtttagttaaagtgatgaatacaagatattgcaattcttccctaatggattggtaaatagctgctgtccctatgccaccccagctgcccagctcttcctttggactctccctagagctccacatgactcagcagtctgcaatcaaggtattcttgcctggcacatcaggagtccctaggatcttaaataatgtgatttgcaactcttctggtttgttaatgctcttaccctaccacttgttagatagagtcaatctttactatttgcagattccatatttgtgaatatacttacttgatacaaatttatttgtaactcccaaatcaacagttgtgatgctttcacagtcatttgtggacatgttcagagtgggtaaaaacttgagttgtccaacaagtgtggtcacaggctccaagggtttagccagtaagctctatcaaacatttgtaaaacaagtaattccagtcttagacaccattttatgtaaacagagactcatttaatgaatttagcataattttgatgtccaatctgataaagtatgaatacaaaaatcatagcagaatcttgcttgttaacatggaagcaaaaatgctacgcaaaaaatcaggaaattcaatgatgtgtacaaaatgtcacataaacaaaatggatttttcccagaaatgcaaggatggcttaatattagaaaatcttttagtgtaattctccaccttaagaaacttatgccatgatctcaatagataaaaagaactccaataatattcatcatttttaaaaagaagaaaaactaacgcatcaagaatagatgggaatcgctttaacctaataaaaagtagcccctccactccccccagtgattaagatgttgtgaccaaaggcttgcaggaacctacctagtatttccttaggagcagtggttgagtatttgctaaatgagagttccaggtgaatttatagtacataactaccatgaataatgagaattaactgtatttaaaatatcatcttatgggtgtggtttatacgtattttaatctttactcttgaaagctttgtgaaaaaatgtgaagagtgccgtcatctcaccttttcattggattgtgactgttttaaagtacttactgggcgggaatggagaatggaatagtcaaatgttgcagaaggatattctctgcgtgaatgtcttcatctttggattcccaaggcagcatttattaaatatttcccgagtatggttaattgattgtgcatcttcaaggggaaattccacgaaccagtgatgtagttgtgaggagagattgggatctagttagatccttgactggtgattcttacaaaattctgattccttttgctacaaagtggatgtgaggtgccatagagagaaagtagtagggagagcacaaagccatgagcaagacagacatgtaaacaattcccactctataatcatagctatatttgaatggttgtaggagaagctgtgggaaattggaggaggaaatgcctgccttttctaggaggtttcatggagaaggagatatttgacttgtgtcttgaagtatggaaagtcattttatttatttatttatttgagacagggtctcgctctgttgcccagattagagtgcagtggcacaatcatggctcactgcagcctcaaactcctgggctcacgccatcctcctgtctctgcctcccaagtatctgagactacaggtggacaacacctaatttttcttttttttcagagatgaggagtttctatgttgtccaggctggtctcagacttgggatccagtgattctcatgtgtctgcctcctcaaatgctagaattacagttgtgagccaccaggggaaggagttctttaggtaggcaagagggtgacattaattgaggattgagagggggtagaattttaggcagagataggggaattagcagaggaatggagttgtgtccagagtgtgtgtgtgtgtgtgtgtgagtgtgagggtgtgtgatatgtatgtggagtgtgtggggtgtgtatgtgcagtgtgtgtgtggtgtgtatgtatgagcatgtgtgtggtatgtgtggggtatatgtttctgtgtgtgagtgggtatggtgtctgtgatgtatatgtgtgtgtggtatgtgtgggtgtgtgtggtgtatgcggtgtgtgtgacagtgtgtatggtatgtgtgtatatgatgtgtatgtagagtatatgtggtatggatggagtgtttgcatggcgtgtgtgtggtgtgtgtgagtgggtatgatgtgtatgtaaagtgtggtgtgtgagtgtgtgtgaaggaggttgagcagataagaaggggacaaaatgttggggatggggtgaggggtggtgagtatcctgtgctgtcaggggtttggacttgatcttgtaggccccaggagagcagtaacaggtttgtttaggaaaggtcaccttgccagctgtgggaaggatagtcaattaggaagtccctgtggtaatattagtgctggtgatgacccacttcgcactccctctccagaaaaatctctgtgctcttggggccttgaaaagcagaccaatacctctgatatcattctctaaatttaaccttttcagacttgagtgggcatacaatcttcttgttgaaatgcaattatggttccataggtctgggtggggtctgagtctctgtagttctaatgagctccgggtgatgccaatgctgttgctccacaggcatgctttggagaggaaggcttcaccctgtttgcaaactacaatagcctggattataaagaaatattgatgtctggtgccaccctagatattctgatgcaataggtgtaggtgtagggtttaggcggggcactaagaattttaaaagtgccccaggtgagggatcagtttttttttttgtttggttgttttgtttgttttaaatttttcaatcccttcatgattttaaaaaatacactaaaaataaattaatagaaaaataaaattgagaaaaaagacttgcaaatataagccagaatttaaaaaaattatcgttagattcaacagatgtgaaatgactgtgtcaagttgctatacaggttctgtttgcttactcttcatttctgcacttttcttgttagcgaccagtaacaaagagtagacctacaacagtccttggactacactttgagcatcagtacaccacactcatagctgaaaccaccagccattcaaggagggcagagaataggggattcatcattccaggggggcaggagcaattgctttaccttgggatggctactggtggctagaatgggcctgatggaatgagatttcttgctcactgtgtttccagattctatagtacctggtgagatctaagggctcttaatgattccctggtggtggtggtggtggtggtggtggcggtggcttcacctgtcagaaaaatcattatggaagaagaaggagggaaactttttctagcttcttgggtctttctctataaatcttttctctttgccttcaagttttgttgtggtatagttattgggtttaaacttcctccttgagaatggtgacagctaccttctcccacgctatattttgcaataagccttgttattttgtacaggttatttcttttccatgccttaaaatgccagctaaaacccttaggacaatgttacatagaagtagcgaaagtcattgggtgcccatgagttgtttctgactttacaaaaaatgcattcaatgtgttaccacatttttttctttttcttttgctgggggtgggaatttgtgggggttactctttattaggttaaagaaattctcccctattctcgatatgttaggagtttttcttcttttttaaaatgatgagtattattgaggttctttttaatctattgagatgatgacataagttcataaatgtattaagtggagaattaaaagattttctagactgggcgcggtggctcacgcctgtaatcccagcactttgggaggctgaggtgggcagatcacgaggtcaggagatcaagaccatcctggctaacatggtgaaaccccgtctctactaaaaatacaaaaaattagctgggcgtggtggtgggcgcctgtggtcccagctactcgggaggctgaggcaggagaatggcatgaacccggaggcagagccgagatcatgccactgcactccagcctgggtgacagagcaagactctgtctcaaaaaaaaaaaataaataaaaataaaaataaataaaaaaataaaaaataaaaaaagattttctagtgttatgccttctaatgaaagtatttctgggaaaatccattttattcatgttatattttatacacatcactggatttgctttactttgtgtttagcattttttgcttagttagtaataagagtgtcctgtgacttttctcattcatacttcatcatattggacatcaaagttatgctaaactcatcaaatgattctctgtttacctgaaagagtttatagaagactagaattacttgtttaatgaatgtttcgtagagcttgctggttaaacccttgaagcccgaagtttttgtgggcagatttttaactaatgactcaaattctataattgttgtagtgttcacttatttttgtagtgtgaatactcccaccctggccaacatcaagctaccaacagtttaacaatcagctcacaaaattctttaataattgacttaataattgactcctggattcctgtctgagatggatgcatgacacccattgatagggttgtatcttctggatttttaattgaaattgcattatatttttctacaaatttattcatttctttgttttcaaatttattggcataaaattatactattctctcggtatcttttaaatctcgacattatatttagctatgtcctttacatttttaatattattttttttccttgctcaatcatgcaaatagtttgtcaacttttgtctttgttggtcctctctactgtatatgtgctttatattgcattaatttctacttatctttattttttcttccatctacttttgctgggtttattctgtttctcttttcttaacttcttaagtgggatgctctgtctgccaaggtcctggcaagaaatagatggcatagtcaaaggaagacttaagagagtgtaaggaggagagtatttacataaatgtgtcagggttaaagaaaccaataagagatgagttacccagaactagcaacagtagtaagcctcattactcagttgtgagggggaaggtagactctttccagacctttgataaaggggctgctcaaaaaagccacgaccttgggcctctgctaaaaccatggctttaagtaaggagggagcagatatataaaaatccttatccctctttctaatctcttatgtcctgtgagtgtcacccattgagtaaacccaagtggaagtcagcaggaaagtagctgggatgatgcagtctttacaggtaagccttttggaagcacagaacaatggacagaagggcaactaatagatctacaggggtgccctgaaagtgatcagcagagagacttagctattgatttcaatctctcccgtcctctcattggtatatttaaggttatatatttccttttaagtactattttagctgcatttcataaattataaaatgaggtagtccattattattcattgccgaatatattgtaagtcctattaagatttcttctataacccatgaagtatttagatgtatgtttatttccatacataagcggttttgtgtgtttggtatttatttctaacttaaccacattgtgatctgagctagtgtgtctgacactaattcctgggaagtttttgagactttatttccagtccagtacataacgattctctctgtgtttgaaaagattgggtgttttggttgtagtattctgtgtatgtcagttagtcctcaatagatcaagcttcttatgatttattcagattttctatgtctttactgatttttgtcttgatctgtcaattacagagataggtgtattgaaaactgtcattatgatatattttttcatttctcttgttttctgtcaacctttgctaatacatttgaaaaatattttattagaaagaatttagtcagtatttcttcctggagaatgcatctctttaaaatatgtgccgaccatcttatcttttgtttttctttctgtctaaaagtctatcttgatggacaataatgtagctctactagctttattttggttaatataatagtgacatttcttttcatcttggctctttcatctggaatcacttttcttctgtaggatgaacattcattacaaatttctttagtgagaatctgttggtccatctgttaggcatttgaaaatgtctttacttgttcctgtttttcaaaaatgtctttctttaacatgtaattctgagtgaacatttattcctcaagggaattattttcctctttactcatttccaagttttaaagtgcaattttccttgcaatttctgggagtttggatagggggatcactgagggctaagtgtaggttgaaccatggaaaattgtttttcataagtcaaaaataatcaaatattggcaatttcttatggcttaaccttaattgtctacccttatgctcaaattggatacctttgggaaatcctagctttagatagaggtgtttgctataagatcatccatgttgtttgggctgtgggttttgtcacctgtcctccatattctatgaggccatggaaacagaaaatcagtaacttgaccaggcaaatgacttcaaggtaagagccaactttaatattcagtttacttcttctcgtttttattttggcctctaactattccttggtttcttgcaagcttatcaatatacttaaaagatattttgaatattttagtggcatcatttagttttcagtgggagtggtaatggatgcagtctgccatactgccaaaaaaagaagtgcttctctttgtcctttcttctcatacattttaaaattgaggtatattccacacagcataacattcactcatttatttatttatttatttatttatttatttatttatttattttgagatggagtctcgctctgtcacccaggctggagtgcagtggtgcaatctcggctcactgcaacctctgccttccgggtccaagcgattcttctgcctcagcctcccgagtagctgggactacaggtgcgcaccaccatgcctggctaatttttgttatttttagtagagatgggggtttcactatgttggccaggctggtcttgaactcctgaccttgtaacccacctgcctcagcttcccaaagtgctgggattacaggcgtgagccaccgcacccagccacattgactgttttaaagtatgcgatccagtgctttttagtgtatgcacaaagttacgtaaacatcaccattatctgaatggaaaacagtttatcatcaccagaagaaactgtacttgttagcaatcactctctatttccccttcccccagttcttggtaaccactagtttactttctgtttttatagatttgtctattctggacatttaatattagtggaaccacacaatacgttggtcttttgtcactggcttcttttatttaacatcatgttttcacagttcatccgtgttgtagcatatatcattaatccatccattttaatggctggataatatccattgtatggagacaccacattttgtgtatccattcctcagttgatggacatttgggttttttctactttttgtcttttatgaataatgttgctatgaacatttgtaaacatgtttttatgccaacctatgtcttcaattctcttgggtatgtacttagacatggaattgctcactcatctgaggtcataaaagggtgtcttaagataaatttctacattctaaaattggattgcaaggacttgcttgagaggtgatctgtggccttgatgacttcaatccccctgccttcctttcacccacttcagcttcccctcttatccctgaatgtgctgctccctctgctgggaacacttttcacatcctcctttcactttaccaattcctgctaatctttcaagtctcagctcatgtgtcattgacacaaggaagttttcttgacaccccagatgaggtcaggcacctgcttatgtgaatgatttagcatcctcattgtctctttttagttattttcttttactattagtaattttacattcgtaagtgattatttgattttacatctgtgttccttgttagactgtaagatccataatggcagggaagatgcctgtagttgttcaccattgtgtttctagcacccagaacagtcttgggaattagcaagctttcaataagtatttgatgaataaatagatgcagtgaaagctgattgtaaagatgctacattagtttgctagagctgcagtaacaaagtgccacacattgggtggcttaaataacagaaatttattgtcttcacaattctggaggctggaagtccaagatcaagttatcgacaggtttggttccttctgagaactgtgagggaaggatctgttccggaactctctccttggcttgtagatggccgtcttctctttttcaattcacattgtctttcctctaagcatgtctctgtattcaaattttccttttttatgaggaggagagtcatattggtttagaccccaccctaattatatttttacttgatttcctctgtaaaggccctgtctccaaatagtgtcacattcttaggtactgaaggttagtacttctacacatgaatttagagggacacaattcaacccataacagatggttatagactactgcctttaatggcaactggagtttgaggctgagagggatggcaagttcatgacagtgtgtgtttcaaaggaacaagcgccaagaggcacttagctagcaattagtagatccagaatgcaaactctttcacctaaaacaggtttgcttatttccatgtttggatctttacctactgtgggataatgcaaccctttgaacatacaggatttcaaaccatataggtctagggaacttttccccatttcttacataatctatacgtaaagggtttcatggtaaaatatatttaggaaatgcttcagacacacttggctttcttagagtgttataaggcacatatactagagactctgataaatcttgcagtaaagtgacttctttaatccaatatttcttgaatttatttatttatttttaccaaggagtcccctctcggtgttaacatgctgtatcatttgtcatttattatgtaatttattaacttactgaatcatttggtcagataggtttgggaaatgctagggtttcttctgtgagtgggagagagatgctatccctggtgaccacctttccatctttcctctccttataagagggtaattacctctctatatctctctcttcctgtttacatgtcacatttaggttttgtatgaatatcaaaagccctggctgtggctaatagttttggctgctgtcacagaagatgagaaggtggctgtgtttactggtgtaagtttgtttacacaggaaatatgcaaagaaaccctccctcattccactgctcttagaaacactgcaagccaaacataagatcttttctgggtctctaagtgcctcagcgatgatttgagcagtagtcatgcatctgttgcaagcttttctttgttaagatcccaattttaagagaatcaacagtataaaatatcacacttgagtgggaagctgattttaaaatggcagatgagataataagatcagattgatgttaattcccttactgcgaatcccacagacttttgtgagaatggagaccagacttattctaaggcatctgcttcttcccacgttcctcccacttgagactgaggaggcaaattgcttggggaaacccctagtcacgcagctgtagcctctctagagatggataaagcagcatgtaggtgaatggtattaggaagcaagtgagtcactgcattttggcatcataactcaccactgtctgtggcacagcagcaatagccattttccttaagcaacatctggacgtgactgcatgaagttacccatgggataacaagaaggctgaggaaagaacatgaattccctgaccttcatcccaggagctcagtttgtctttgttttagctccagaagtacagctctaattaaaacctccatcaaggaggtgaggcctggtctaaaggaccccaggaaggccacattgggccaaggagccagttaagtttaaggaagctcgggggtgagtttgatgccaggaaacagagataagcttgaatgagcagccctaaagggttctcttaagaaacattctccaaagtccatttggcttctgtaattctgaggttctttatcctagaaatacatcaagccctctgctaagtgctttacctacaggtgttttttaatctgtaaaataactccatgacacgtgttctgtaattatacttattttataggttttgaaacaggttcataaaggtaaagccacatgtccaagatcacgcatcactaggattcacatccagatctgtctgacacctgaacccctgctctgcatcaccatgttgcctaacttcatgagggcgtgcagcatgttatgaatggaaatgcgctttcacaatcatctccctccatctctactataactgtgttagataagttgagtaggtattattattcccttagtgcagaagaggaaactgaggcatagagaggctaagtgacttgtcccaggtcctgtagtgataggtggtcagatcaagggcccaagtcatatcttctccaagtccagtttcttcccaccccatgctgctctttgaggtctgctgttttatagcccctgcttctctagcctgaatgtgtggtcagggtttgtggtgaatgtgaaattgagtcagaacccagttaattatggagagtacatcataatgcccttaggatgaaaaattatcattattgttgtttttaaacacaagactcacctaaaaacttcccatgaacaaaatctatagtttagttggaaatataattgtttcactgacctgtttcttaacgctcctcattataaacaacaggaaaactatatgtaataaaactttgacaaaactgtaagttgcctaaacaaaatcagttaaaaaaaaaagtaaagtttttattttatgatcgcttaaggagcctgaggatatgaaaatggtagaggtggaagaaacaagggctgggagttaaaagggggtgtttggtgaggaagaaaaaataatgaattgcagtactttaagagccactgaaatgaagcactataaattgctcattaaaaaaattatttgtgaattaaactttcaagacttaaaaaaacaaataaaaattttgacagattatagcctgatcaaggtgctcatcttgcccttactttttatcaaattattaaaaattatgtatagatgacattaagatgtctgagatttgattcaaaataatctagtgggcaggataagtaaacatgattggccacttgttgataactgctgatactggctgatgggtacatggaagttcattatattctctctagttttgttatttgtatgaaaatttctatagtacaaagtttttgttttttgtttcttttttttccttaaagaaactttatttcttgtagccacctagtgccatctattggacgtctatgggaactggcctttaggagaggaaaacctgctgaatcgttaagtacgatgcacagtaactaagaagtgagactcttggctactcagttacttcgaaggaccaaacagtgggcagttgatgggcttgcttctacttttggagtcacagagttgggtataggtatgaaatatgaacttttcagccaggtgtggtggctcacgcctgtaatcccagcactttgggaggccgaggtgggggcagatcatgaggtcaggagttcgagaccagcctgcccaacatggtgaaaccctgtctctactaaaaatacaaaaattagccaggtgtggtggtgtgtgtctgtaatcccagctactcaggaggctgaggcaggagaatcacttgaacctgggaggcagaggttgcagtgagctgagatcgcgccactgtactccagcctgggcaacagagcaagactttgtctcaaaaaaaaaaaaagaaatatgaacttttttatgtctcagtcaggtagtcatctatagaaacaaatagcatatataagctttttttttgagagaccttagaaaaccagcagtttggagggtcacaaaaattctattataacttctgaaagtaggaaataatatttttatgaaatcgtttctgcactaatgtgtttcttaggttactcagaatctgtaacaatgatagattttagagttcagagcctcatgggttgaacttttgttgtctcatggtcccttgttgatttgaccctcttctggccaaatagccaacttgcagattgagcaccattttaaccaggaaagggatggaaagataaccacttagtgtctattttctcttgctttttaatattttctcatttaatcctcacaaacactctgtaacattggtattgatattaaagtgctgggtctgccataacaaagtaccacagactgggtggctttggcaacagaaatttatttcttcacagttctggaggctggaagttcaagatcaagctatcggcgggattggtttcttctgaagtcctttctccatggcttgtaaatggccattttccccatctgtcttcacatggtcttccctctatgtgtttctgtgttctaatctctttttcttataaggacaccagtcctattagattagggcccacctcagtgatctcatttcatcttaattacctctttaaaggccacattcagaggtactgagggttagggccttaatacaagaacttttggggggacacaattcagcccataacagtgttatcatcgttacccaccccccgctttttttttttttttttgccagtgatagagtgaagacttggattatttcagtatctacccccagatctcataatgtggaagtggcacggtctggatttgaatctggattactctcacactcttttctctcccacactgcatgctggtgtcctgtttacccctttctgcatgccaggagacacttcttgtctctgacttcctcttggtggagctgaacagcacccctcaggtctctgctgctttgagaacaaagatttttgtcattgcttttattttagtagtaaattaaggttttaaacctaaacatttaaattcagttatatttatttcagtagaaactgaaggtttgtactgctcatttctccagggaaatagacaagggctaacccaaatactaaagtagtaagacatttttgtcctgatttccttctctgttgtctgggttgcccttcttggctggctcttcaggagccccgagccttgttatcttctacttttatcctgcagataagctgttcctcagtttccccctcccttcatttgctccatttgtccatcaccccatcttcccctgatctcttcctttaggaagatgtctagagtcaattccttactgcgtttagaaggctcacttagagcagatcagcagtggcaaatcagtaggtgattcaaaagactctcaagctataatttacatcttgggaaaagcctgaataggtagctctcatttttcacaaaattttttcttacctgtcgataataatattaacaatgaatctgcctgttcaagatggctgacagagcatacctgttcaattgtcctcccttcccaaattctgtgagaatgaacgaagaaatataaacattgaacataataacttatatatctactttcacgtacactcatttgatattcacaacaaatctgaaagttaggcagtaatggctacattttagctaaggaagcgaaggcgcagacagagactagcttgcccaaagcaaacagccaatcagtggaggagctggcagcgcaacccagatgtccaggattatctcattcagtgctctagtttgtcgaggttattttgttctgcgagtccaaccatccgaccaggcagcctccgtttctaattgccttagaattgctcatatggtgaaacaactttatatctaatttaaaattcaaaggtctgtttttgtttgcattagatctcaatttactgcataggctgtatctggtcttaccatccatccctcctgtaacacaggccctctccagagtagcagaattttcagtggtgtgtgggtgatgcccaagattcattgagctggccatcttaggcagctctctatcgcatttagtattatgacagtatctatgttttggtttggtggataaaattataatgcaatttgatacatggtttcttaaaactttttaccttattggtgtctacctgaaagcaatgccaagtgtccagtttctaaaagtgatgagcagaaatagatgaggcaggtgtctatggagagtttgtcttgtccttgaattcaaaaaggtttgagaaccatggtttcagatcatcctaaataaaatgcaatattcctgagcagttgtgtaaagaggaaatgcacccaatccacggctttactgacatgattaggcaaacgattattgaccaaaagctgtttaggataaaagtgagcataaatccttatactggccaaggcaaacaacttttagctgtacatggcagatagatatgagtgaattctacaaatgaaaccaaatcacgccagacaaacaaaacactagtacctaaatctgagaatttgagagctgtcagataaggtggtaacctacaagatatatttgataacgaacagatttgaatatactgacatttaaaaataacaatttttcttatttgctctatgcttttcaagaacatttcttatttgattgcatttattatagaatttgggaacaaactacttgttattttactatatggacatactgactgctactttttggttacattctctaccaccctctgtatcttgttcactgattatgtatagacagtacatattcacacacgtgccatgtgtaccacatatacagatacactatgtagttagtggctaccacacatacatacacacatacacatcaggattatattgcacatgatatattgtaagcttttctcccttaaatatataatgaatttatttgcatgggaacaaatagacttatacattaaaaagtgccttatgttctaggccaatttgtaagcacacaggctgctatagaagatgagacccatattactactgaatttccacccagccggcaatatccattgcttctatacattggatttattatagtttatcatttccagatcggtgttcagggtttaggtagctggttgatagagaagtataggcattccttgtttaggcatgggatgatttcctggaactgggagaccaaccaaatgagcaaaatgagcaagaggtggtgttagcagaacataacctctctgaaggcgcttttctgtaattgatcttgtaactaccctgaattcttcttttttttttttttgagatggagtctcactctgttgcccaggctggagttggagttggctcactgcaacctccgcctcccgggttcaagcaattctcctacctcagcctgctgagtagctgggattacaggcatgtgccaccatgtccagctaatttttttgtatttttagtagagacaggttttcaccatcttggccaggctggtcttgaactcctgaccttgtgatctgcctgccttggcctcccaaagtgctaggattacaggtgtgagccaccacgtctggcccttgaattcttttaaaatctcctaatgttaggagatgcctcaggccaaagttttttaggctatgattccctcaattttggtcattcttcccaagctgcagtggtaatgccctgactacttttgacaggcaccctgttttccctgccgtttctttgaaggcatcttgagctgctttaaaagttgtgttttaatactcagtgtgataatcttcctcgccacttttgaatcactttcagcacaattacttgcaaactttttgttatccatcatgagtcaaaaaccttcagtggaacatggcatgagggcaggaagagacaaagtgaccaaagatagtggtgtaacaagggtggtattggtgggagcagtcccctgtgggtgcaggcaatgagtgggcacattgtaaacagcttaaaaacagtaataagacaaaaaatttgtctgctttgttatcactgagcaccagcaattctaaatgatgtcagtgataaaattcttctctgtacctcagctgactgttcccatctgctgcctctccgggaataccactgctgagcaaacactagatttccaggctctgtccacagtgaaggaagcacagttgagttcattagtactttctggatgacagcattaaaatattatagccacatgtggctgtttacagtgatatcaatcaaaataaaataatattaaaaattcacttcctcagacacattttaagagctcattagctctatgtaagtagtggctaccatactggacagtgtagacatagaatattaccatcattaatgagaactctaggagacagtgttgctttagactaccagcagtctggccataagaaaaacatatattaaattcattgctcagatgcactgtatatagtaaacattattgcatgtattacatatatatagtcataatatttatgagaataaatagtggcataagaagtcagcattttatggggcagcattaaatgacatagcatctttgcccataaaagtttgagagtagtatagctcaatgttaatattaaatgcccactttgtgccagatactaggctaaatattggagacagcagagtaattaattgaatgcctgcctaggagtagtttagatctagtaggggaaacaaagaggtaaacaaatattacattgcagtgagatagttataataattgaaatgtgtttatagtatgtggccagtacaaaggagggcttaataagctatctctaccttgaaggtggaacttggtatttcaagtttgtgtgggaaagggcaatatggcaatgtaattggagaaatgaagacctagggtgatttactcacaaggatcaatttagctcagcctactgtaaaaaggaataaacaaggtggtttccaggcttaaggaaaaggggtgagctttactgcaagcactgatgttgttaacctggaggatgagttaggttgtcaggattagaaatgtcagctgagttaatgtcatagaatcacagtgtcatagaatcatagaagtcattgtatgaagattgaattatgaataataagtatgaaatgaattggggataatggcatgctaagacagggaagtagggaagaaataataaagggcaaagtatagcaggaaaaaacaaagaagcattatttgacccaatgttgagtcccacctagaataacatttgtgcttttggccataattaaagcagcagagtaactggagctccagagtgggggtagttttgtcaaacccctggcttctagggacattggtgcctttaaaacacttgtagggtaaatataaacagtacttattgcagtggctctcaaaatttagtgaacataagaattacctaaggagctgttagaagagattttctgggcaagtccccactccactcgagtatgtttgggatgaggccaataatttgcatttttaacaaccatcccaggtatttcttatgaaagtggccccactgaccacagtaggagaaatactagtttattagaacaatgaaatgggaaagaagaagtcaggacacatgaagacttcctggtcacttcccttccaaaagaagagaaggaatatacaaagtgaatattagttttgatttccagagaaattttcatctaaagcaaatggtaaatggattccagacattggctattacacgtggaaatgagctgaccccattaagaatagtaagagggaaataattgcttgcactttaagatttatttaatttgcaacataggtttattaacaataatttgtttatttctataaattggggacaaggctagggtttgtctagccacagctctgggtgaaattctaagcagacacttagtgaaaatcaggtctttgttgtagccagcatgctgcctctctattagttctcaaagatcctttttaagttcctctgaggaatgtttctcactcgagataaaggggaagctcaatatcctcctaggtcaccattattgatctgccctaaactttctttcttaccaaaatgaagggctctgcatcaagggatcttcatggaagaaaagctcctctcagcacgcagggcacaagatggctgatgtggttgatgttctgtatccttggggataaaagagaggagaaagggtaactgggcttcttggagtagaagagagacaaagtctaggagaatgtggtaaggtgttttgaacctctagggcttccttatgtttgatgtgggcattctttataactctaatttagtcataaagtccttaaatgggtagtgtttggtccttattggatggatggcataggcaaggggggcctggggaacgggaagtcttggagagaactctaaggaaggaaatccataaaagagggaggagaacaatgtgccctcccagaagcctgctggaaaggaaggctgatggaaggtgcctagagataaggtattgagtcagaaaatgttaaacagaagagtgcctttggtaaatgctgaaaatctcgtggcggcttattgttattgccctgatacaaagttccatcttcctcatttgcctgggaccaatatgtctgagctccctcctcctggacaggaaagtaactacctagtcattctggggacccaaagaccttgctaccaagtgggtctcctaactaccactgagctggctagacaaaaaactttctgggtgatggtagccttgaggtttggctagggtcaccctcccatgacccagcataggattggctggaggctgaggcagatggatagactggggaaattcagggctgatgagaaggaagccactggcccacaggatcactgctgaagcagtttatcttctctgagttttcagtttgaggaaaatctaactatagaacaaaacaaaaagtctcaacaagtgctatttatattcccatggaaacactctcataatctaaaacagtggttttcaaagcgtgtttcctggaccggcagtattaacatcacctgggaaactgttaaaattggcaaattctcaggccccacccctgacctactgcatcagactgtctggatcttagccaagagcattagccatctgaagaaaacattttctcaaaagttctgtaatccttatgccccttagctctaaccaggttactgttttggaatttttaggaatttgaggaaaatgttttgggcatgcctcccgcctctcacttggagcacacaaaagaatacctagtgcatagacaaaactcaatacttctatctcttcacccatggcatgagctcttattaatatatatgttttttccttttcttttctttttttttttttgagacagagtctcgctctgttgcccaggctggagtgcagtggtgccatcttggctcactgcaacctccgcctcctgggttcaagcaattcgcctgcttcagcctcccgagtagctgggattacaggcatgtgccaccacacctggctaatttttgtaattttttagtagagatggggtttgaccatgttggccaggctggtctcaaactcctgacctcatgatctgcccaccttggcctcccaaagtgctgggattacaggcgtgagccaccgcgcccggcccctaaaaaattttatttttattagcatggaaaatccatagcaaattgtaaagctgcagatgccatgttaacaccaaggtcttgcaaaatgtgtatacttacaggatgtgcagatatctttgtaaaattcatggaaagagaaagagaaaacaaggcgcacaggcagaggctccagagaggcagtgacacctgctgctcagcctgtgtgccttcctggcaggtgcttccattactcaaccttaatgatggtggttcttacagtggctctcgtggcaggcctgcctctgacttcctggtgcaccatcatctgctgctgccttcagcagctgccatattttattcctccccctccatttcttacttgagttgaattcaggtgaggttgctagatttaccaaataaaaatacaggaagcccagttatatttgaatttcagataaacattgagtaatttttatagcataagtatgttccatgcaatactaggacatagtcatactaaaaataatttgttatttatctgaaattcaaattcaagtaggtgttttgtgttttatctggtaagcttactttaaggaaaaggaattaccatttccagttgcctaactcaggaggggcattttcttttagaaaggaatatacttttccatataaataaggacagccttatctgcatacacctgtgctatctattaagctagtcactagccacctactgaggacctaaaatgggactagtctgaattgtgtaaatactgggttttgaagaatttgtgtgaaagagactataagatgtctcgatgtttttttacaaataggttatatgctgaaatgattttggatgtaccgggttaaaaagtattgttaactctcttttccggctggaaccatggagggtgttgaagagaagaagaaggttcctgctgtgccagaaacccttaagaaaaagtgaaggaatttcacagagctgaagatcaagcgcctgagaaataagtttgcccaaaagatgcttctaaaggcaaggaggaagcttatctatgaaaaagcaaagcactatcacaaggaatatatgcagatgtacagaactgaaattcaaatatcgaggatggcaagaaaagctggcaacttctatgtatctgcagaacccaaattggcgtttgtcatcaggatcggaggttatcaattgggtgagcccaaaggtctgaaaggtgttgcaacttctttgccttcatcaaatcttcaatagaaactttgtgaagctcagcagggcttcaataatgtgctgaggtttgtagaaccatatattgcatgggcatacccaaatctgaagtcagtaaataaactaatctacaaatgtggttatagcaaaatgaataagaagctacttgctccaacagataatactttgattgctcgatctcttggtaaatatggcctcatctgcatggaggatctgattcatgagatctatactgttggaaaatgcttaaagaagcaaataacttcctgtggcccttcaaattatcctctcgacaagttagaatgaagaaaaagaccaccaattttgtagaaggtggagatgctgacaacagggaagaccagatcaacaggcttattagaagaataaacatgcctaccacaattattttttgtaatctagccagttaataaacagtacctgctctcaaattgaaaaaaacaaaaaaccaaaaagtattattaagattaatgtagtctgtttctttttcctctttgactgtggctactaggaaatttaaaatggcataggtagcttgcattcatagtccacattccatttccactggacagtgctggcctggagctggagccaagtccgggagacataatgaccatcaggccaggagcaaagtgccaccctttcgagaaagtgtgagattctcctcattataagcttgtggcttaaatggctggcggtgtacaggttctttgaatgcagtatttattcacatagttttcattttctgtcctgacaaaaacttggtgatgtttgaatgattacagaacaaataggattgtggtttatgtttcctattatgcatatttggcagttgaattatgacattagattgggacatggtgagagggggcaggatacggggtaggaggaggggagcaagttacaaagggccccagttccgggaagctgggctgagttgttctgtttaacttcttcttcctttattcctatggttttatgattgcaaattggcagtggcagggcagctctgactatatttgctagaagcagatgtccacattaatttagatgtttagggattaaaaatcatagagggtggcgctaggaaatatagaaaatgccaatgaaaatttttgtcaggcaaattaaatctttgcaagtcccccgacttctgaaaactatttacagaactggattctgaaagtgggacatctttttataacataaaatatctggggatttcaaggtttagatctaggacttttaagtcctgtgtttgatctgccaacccctccctctttcctccctccattacttaacctttttccctgaagttcctggaaagcaaataaacactcgtgaaagcaaaggaaacaaaaatttaggaccttttagaagccaagagcttggtcaatggtaaaataacctgatctttaccaagctccatttaaaatgtttatgccaaccatgtcaaattgaagaatcagttctcagctgtaggatccaccatctgttgatttccattttttcttcctgatctcaccacccactgtctgggatgccacattgcccttcacagatgctttgccacctgattctaagatgtgacatccaagatctccagccagaaaaggagttgctgccacatcttgtatgaactagcaatcaagtggctatttcgtccagcccattagccctccacccacccccttggtctttcacttggcattactttcagtatcttgaggattattgtagtactgtgtaacacatggcctttcagtaagaaaagcgttgatggcattgcctggcagaaggaagtagagagcagaggcttaggggctgtgtgccagatggcattttgggagaaggagaacatctcacttctttgaaggcttgagatctcaggtccaaaggagactgagtgtgtgggaggagtggtagctactgaccaggaagttgttgctggctgcacttccctcctgatagggaatcctggattgcctacagaggggtctgaggcaattgtatctggtttggggttctaccaagtgaagctggagatttgtaaaagcttgtcatctattgatcgttggtccttgtactataccaatgtggagatggagacatagtgcaatttgcttagatttaggtgccaaaaaaaaaaaaaaaatcagacgtctcaggctcatctcaacagattatattgccaagtgtcaagtattagactatgacttcattctccttatttactgcctaattatagtcatgttgtgcaccactgtgtttgtactattttgagattcagctataaggcagtgcagtttatcatagcaaatcaaagcaggtgagaggaaggacagggtttgggtgtagcctagtgtgtttgatggtggtgaggcatagtcagcaagacagaaaaggaacaggacccaagggcactgcaatctctcatcctggttgaggcatgagatgggagaatcccccaacaggtacagcaatgatggtaaatacaggcagatagttccagctagggctggaaagatctaaagacttgttcactcacacatcttgttggaccttagttggggctgttggtctgaatacctacatagagactggtgatagtgggacatcagcctcaggtgttcagattttccatgtggcagcttggacttcctcatagcatggtggctgggatccaagagctaggatcccaggagaaggaggtagaagctgcacgtccttttcagacctagcctcagaagtcacacagcattacttttgccatagcctgttggtgtagaagtcctaagccgctggccagaatcaaatggaggaaacatggacattacttttcaatgagaaaaacattaaagaaatttggggccatatgttaaaacacaatctgtcctatgaccacaattgtttactttcctcccaaatgcaacatatattcactccaccaaagattctagaacaatctcattccattattaaatcaggctcagactcgaggtccacatgcaattgaggctcctgcagtgtggttcctcaagtccatcttcctgagtaccatccttctcaatctgaaaacctgtaaattaaagagactgatgatctgtcctacagtggtggaacaggaataggataactgcagtagatactcccattcagaaagtgagaaagtaggaggcacacagcagccactggttcacagcaattctgaaatctccaaggcacatgtggctaattcctttattagggcttactttgctcttatacttattatctgagaatgatctcccatggttcttatctctgccctctaggctctgagttactcttccttgtccttgagaaatggacccataggtaatgctaggagatttgagaagagaggaagctagtacctggctcacttgttcataggaagcagagctctggatcctggatttggttctggagcagggatctggcagtccctgggcatagagactggtgataatgaaacatacggacctggttcttatagtagggagtagacagacattaatgtctcaggccccttacacaaaatgagggactgggcttaggtattctttagctcaggtagggtagaggacccagataaataagggagttttcctataaggaaaagattaaaactatttcagtccatgggagcttggtcaaattgacaaaaaatatgcttagtttttttttttctggagccaaattcacttcctagaagtaaatccgggccctttgagagctgaattgctttcagcaacattaatataatacattaatttgctattcctaggtgatatcatgaaggagttttaaattgaggtagttttcctgcagagctgctagaatattttaattatttccttatggtatatatttcgcttacttccaagtgggattgaggcagtatacatctaaaaagattatcaaaacaaaaataaaggatcagaaactatataaataagtgtgctaagacttagggttaatttagtaacaatgactgaatattaaatgtgctctaagcttcattccagaacatactttcatacagctgtgtctatgtttggtatgtctttgaatatgcataagagtctaagtatttgcttctggaaatatttacttccaacttctttaaagataaagcatctcatttatttagaatggaatgtttgaagttggaggagtctttagagatcatcaactccagcttcttctctctgcagctgaaggctggaggatccagagagattcaggggcttgcccaaaggtcatactgattgatcagagttgaagttgacttcatagcccagtgttctttcctctgcaccataaaggagcaattctttttttttttttttttgagacagagtttcactcttgttgcccgggctggagtgcaatggtgcaatctcggctcaccgcaacctccgcctcctgggttcaagcaattctcttgcctcagcctcccaagtagctgggactacaggcatgcaccaccacacctggctaattttgtatttttactagagattgtgtttctccatgttggccaggctggtcttgaactcccgacctcaggtgatccgcccacttcggcctcccaaagtgctggtattataggtgtgagccaccgtgcccagcccataaaggagcaattcttagagctgaagttttcagagtccactgttaattaataatttaatgagaaaggaaaaactatatgtttgcaataaaaaaatatgatttgatatacacagatctgattttagatatgaagtggctctaaacacacatgaaccagcaggctcatggctggacagtggtaaatacagggagacagcagagtagagacagggttaagggtaagactgtgaagagagacccctgagggaggccagaagttgtcctcctggtctctgctcacagtgaggctccagagaaggtgagaagtcaagtctggatgccactactctcctcttcagccatacagtgaagtgaaagccattacaagtaggatttggtcaaatcaaagaatttcagtcttgcatgtcattttctgacttccaaggagttagaattcaatcagagaagcagaaccatataagtgatataaaatatttattatagggatgagatctcacgcaattgtgggaccttggtgagtgtataggtaagtctgttgctcctgtgtctagtgctgggcctgaagtcagcaaggccagcagtctggaaaggaagatcaatatgaagtgggggagagaaaggataaattggaacccacatcagtctctcaatgcctccaaaccctccaactccaacaatgttgggatttgcagaatggctgactcatttcaccccaaagctgttcacaaacttggcccaggattcagagaagctaaagagaagatccagtaggaggtggaggaactacgtgcttgcagctgccctgatggacaaagtgagccacaagatcagtgactatgggcagaatgcaacagcacctgcttctacacctccatctcattttaaacatgctgctgcttcacttccaccttcacatgtgcacattttcttgtgggcaactctgatagacaaccatgcagagaagggaatttcgggagatgtatttccagcttagctaagttgatttcatataagccaccacatccatgaattaaattactctccttattctcccaataatcttatattcagtgcactagccaaagggttggtaagcttgctatttttttaattcttaggaaagcttagagagggagagtacatgagaaaaaaagacatttcatgaaacaaattagcagaagcattcatggagggacacactgatctcactgatatggtggtcacacagtaacttttaaggaacaaatctttctcataaaacaaggcacatctctacctgaaattgtaactgctggactagaacaaagtaatctgagcagcttgaatgtaccttgtaaaagggcttttgtttcatttagaaaataacttgaaccctgggaaaatctggatcaagttgagagagagaaagaaagaggaagtggaagagagaagagagagagaatgagtttgagagtgaattttagagtaaaacatagcacattgtatgacctccaggctataatagagtgtatataaagcatatatataaagcatatataaaagcccctgaaggcttatgagaggtaaactgcaaagcattgactaaatatatcatttggccaattttcccatgacaatttagtttggtgccctttgactgggacgttctgttttttttttccctttaaaaaaaataaaataaaactaacatgtacctctcacctggctgaaggcttaacaaaaacttgaaagacttccctagactacagtgccaacagagtgggaaatctgggcacagggcctaaattcagatgctacttctccaagaccagaaaaatagactaatattattagctgcattttgttttgatgttaagtgaataatgaaaagggctaaaggacaccatgactatctgggaaacaaagaatgccaggtggtggtatgccctgttgcaggcagagggaggcatttgagtttgctattgagttaaaggaagaatttgtctcggtctgtgaatcaggcgcaatctgttcactaagttagaggttgcagagtatcttaccctcaagtgagataacatgtgcctgtgcttgtcatttccacaataggcatgcagctgctttcttgagatggtttacttcattacacaatttctttctaatattagaccataggtttttctttattgtggtaaaacattatatagcattaaatttaccatattagccatttttaagtatatagttcaatagcattaagtacattcacatcattgtgcaacacagttctagaactttttgtcttgcaaaactgaaactctataccaactaaacattaatttttgcctctccaaccccctagcccttggcaaccacatttctactttctgtttctatggttttgacgcttaagatacttcatatggttagactcctacaatatttatccttctgcaactggcttatttcacttggcataacttgaagttcacccatgatgaggcatgggatagaatttccttatttttaaaggctgagtaatattccattgtgaatatactccacattttctttactcattaatctgttgatgaacatttgggtggcttccacctcttggctctgtgaataatgctgcgatgaacatagatatgcaactacctctaaagatcctgctttgaattcctttggatgatacctacaagtggaattgttggatcatatggtaattttatttttaattttttgagaaacctccatgttatcttccataataactgcacattctcaccaacagtacacaggagtttcaatttctccacatccttaacaatctttgttattttgttcttttgatagtggttattctaacgggtgtgaggtgatgtctcattgtggtttcaatttgcatttacttataattagggatgttgatcatattttcataggacaaaggcatttataagaacaaatattttgtgcaaaataatatggggaaaaattaaggtagtaaggttgagggtgaatcttgtggccatggtaagaacatattttctttttaatgtgggattgtatttgaaaactctcacacagtttaatcattttgttctgccattatttggccatccttgtactttctgactcggtcctccatgagaaggtaacatctgaatttgtgagtcattaattgtcaggattagaaataatttagtagatcttctaattgtaacatccacattttacagttgagtaaactttggattaaaaagtgaaaaaaattcaattgagagcaatatcttgatataaggggaaaatccttctgattactgagaattttaatttttttcctggcttcattgaggtataattgacaaataaaattgtatatatttaagatatacaatgttataattttatatacatatacattgtgaaatgattattacaatcaagttagttaacacttccattaccttacatagttaccatttttaaaaatggtgagaacctttaaggtttactttctaagcaaatttcaagtatacaatacagcatttattattacctatagacacaatgctgtacattagatccaaagaacttattcatgttataatggaaagtttttaaccatttgaccaacatcaccctatttctcccaccactaagcacccagcaaccaccatcctactccacaactacaagttcgattgttttttagattcctcacataagtgagatcatatagtatttctctttctctgtccaactttttcacttagcatgatgccctcaagttgcacccatgttatcacaaatgacaagatttccttcttttttatagctgaataatattccattgtgtttgtgtatatgtgtgtatatatatgtgtatgtgtatatatgtatatatgtgtgtatatatgtatgtgtatatatattatatatgtatatataagtatgtgtgtatatatgtgtatatatacacatatatacttatatatgtatgtgtatatatattatgcatatatatacacacatacacatatatacttatatatatatatatatacacacatttccaataaaatccaagtgtatacatatgtgtatatatatacatatatatatgtatatcacaggtgtgaagtgatatttcattttgatttgcatttctatgatgattaatgatgttgagagctttttttatgtaattgatgactgtttgtatgtcatttttgagaaaatgtctatttatgtcctttgcccactttttaattggactatttagtttttttttctattaaattgtatgagttcttacatattttggatattaaccccttgtcagatacgtggtttggaaatattttatcccattctgtaagttgccttttcatgttttaattgtctcctttgctgtgcagaagctttgaaaaacttaaattctagtttccattattagttttatggaatctagaaatattaggaagtttcagtttctgaaacctgtggttgaacatattttgaataattgccacaatttttctgagatctctgcaagatgttttgttttgtaaatcccctccttttttgtggctctgatgaaaatcgttgagtgctacgctttggaatcagaccagattatttggcttatataccttataattaaaacaaacattaacttttacttttacttatgttttgagagcactgagagcaaattcatatatgtgatctcatgatagcagaaggttaggaatataagagcagatcagttcagctcctatcttgcggcaggtgctgttctgggccttatggggtttaaacaatctcaacaaatacggacaggatcctcaaaactagtgcaggcctgactattcttcccagagtatcctgtgtgtattagtcagggttctctagagaaaaagaaccaaatacgcacacacacacacagatatatatatatgcacacacacacagatatatatatacacacacacacatacacacatacatacatatatgtatatgcttgcacacacacatacacacatatacatatggaaagagatttattacgaggaattggctcatatgattatagaggctgagaaatcccaagatctctagttagcaagctggagacccaggattgctgatggtatagtttcaggctgaaagccagcaggctcaagacccaagaagagctgatgtttcattttgagtccagaggctggaaaagactgatgtcccagctcaaagcagtcaggcaagagaagtcccctctcactcagcatttttcctctatttggatctcaacttgattggaggaagcccaactacattagggagggcaatctgcattactcagtctactaattcaaatgttaatctcatccagaaataccttcacagatacccagaataacgtttaaccaaatatctggacaccctgtggcccagtcaggttaaaatattaaattaataagtacactatggtgaccactgagggtttccagtatgactttggggatatatggacaagttggctagctgtgtgaccttgggcaagttatttaacttcactgtgcttcagttttctcatttgtaaggtaaagatgataatatttcctccctcattggattgtcttgaagattaaataaattagtatttgtaaaatgtttagaagcatgaatggcaagttgtaaatggaacatgttatatatgattttaacatattttaatagttgtctatgtattttgatgtacagtaaaaagaaatacaactagcatgatttcaaggatatttttggtcaggatgaggctaagtaaaaaaaacagtaagttgatttcaagacaaatagtaagtaaatactactataggaggtatgtggaaatgataaaaactgtgacaatggaaaaagtaggtgataacatttagaaaatacccaattttctgaggaatttcctggaactgaaagctttcctgagatgtagaacatttagtactaaaactgggtaactctccagtaaaccaggatggttgggcaccctgtatacaactacagcctgatatttatcccacaagcattttttgaacacttgtgttgttccaggcagtgggagccttcaaaggaccctgcctctaatgtgctctaagtagagtggaccccagtccatatcctgccactgacatgcttgtgattttaagcaaggctctttggcttctctcaacctgtgtttcttagtgtacaaaagaagtggttgaaataatgatctctaaaacccttccagcactggagttctttgatatgaagcacagagtacgtctgctactgttaaaatctcaactcccactgatggccagcatgagaaaagaacaatgagcaaagcatgcattgtaattattttcttagctctcagttccagcctgaggtagaggagcctcttctatgctcccaaccaaccaaaactctgacacaaaatgatcatcccaaatgtaggatcccttggaaatgcctgaataatgtatgcggcctaggaaattggcagaagagacacttctcaataggctcaaacatgtaagatttacataagaagcacctgcacaatttattagggtgagaggagatgtttatgaggtcaggaaatataggttgctgtaactgtggttgtgtttagaagttgaaaatgaatctttggtggctggaccaggataaattatttacttggttgattaagagactctcatctagagtgttgtttctcttcatcaaataacctttcaaagttggcaatattccaaatttcagggacgttatgttacacaagagtgtaactcactgaccatctgtttttgtgtgactaaaaccatcttacagttgtggcttggaaaagctatctcacacaaattgttatttatatatatatttttccagagtcaatttaatgcaacaaatatctggagtgctagttatgagctcaattctgtgaagtcatgaagaggaataagaatctcagttgctaggagccttagctaagagaagctcaacaggaatccagtcatccacattatattgatgttgccatttgtggagaatctgattatttttacttggaattgaggtttgccttctgtgagatatggtggacaggaataaggctctgggtactggccagtctaagaagagtttcttggctcctgagaacttagttttcaggagtcctgtcttttttcataataaacctcttctaaagcttgtaatgcccagacttccttcagacaacattctaattatagctcccctgagtcactggaggtttttagaaccagaatgttgagagagagagagagagatagactataaaagcaagcttaccagcatgggggtatagctcaggggtagagcatttgactgcagatcaagaggtccctggttcaaatccaggtgccccctgtgcatttgtgtttttgtttcagaagaacatggattgactttgacttcttatcttctatggctcatggctgattgaataataactaatgtccctggcttgcattcttagtacatgcaagtctaggccctttacattggttctcctctatttctgaccacagttttacaagacacatacttgtttgcttgtatttccattttacatgaggaggctgagacttggagatacttagtaattcactcaaggtcaaaaagctataaagggcagattcaggatttgaactcagagcacacactctcactgacttaagtatactacacatactgctctcctaatgttaaaatctttgtgacaaactcctactaggcaatgttcccacggtcctgtgattgcctatagagttttagaacctgttggccacaaggaaaaccagggacttagtgactgtgcccatactttgcactgccctggggaaagcgaaggaatagggttttatccacagaacattttcagggaggtgaacaagaactggtctgaagtttaaggaactgcatttttctgctttaaagcttaaggatttctattaccttccatcccctgttcatttcctacagccaaatacccccacattgggtaacttcattcaggacccaggcatggagccagaagtcaggtgtaactcccacccacaatacaggcaatgctctgtttttagatcagtctgaacaacatacactgggcacctactatgtaccagaaccatgcaaagtgtgagcccagtggtgaataagacattagcccctgccctcattcagggtgtaggcatatagaataagaaaatagagtgtatgagctgtacctagctgcgataggtgcagtaacacagaagaggcagcgattacatctgttcagaggaggggaggtgaaggtaagcgtctggaggagctgatggccagtcagggtttcaaagatgaataatatcttacagatggagggtggaatggaggtggggttgtggagagggatggttgcaattccaggcagaggaaacagtgcagcagaagctgaagccaggtagatgcagatggaggcagctggagcacaaaatgtgatatggagagtgccaaaagataacgctgaagctgaggaggcaggtaaaaatcagagagaagaactgcatgttgtgctaagagacttgaagtttattgtgatggcgtttaaagggcagtgatctagatggacttagttttccaacaggctgctctggaagcagtacagggtggatgtgggggtggaggccgggagggtatttaggaggtggtggcactgacagtgcaggggtggagatggatttgagcaatgtcaaagataaaatcaatagtgtcttctgattcactggaactggggaggagagggtgggaggagcctagagttgccttaagtgttttggtctagatgaccgagtacaggatggtggcatctccaaccaagataggaaggagactgctcagctggttaagcagctgggctcttcacacagtctgagcctacgctggaatcctggccctaccacctgctagctgtgtgacctagggctagatattccaatcaatctgtgactcagtttccatcctgtatactactactcatgcctattttataggatttttgtaacaattacatggaggttgttggtagaacttttagtaccatgcctggcatatcgaaaatgcccaacatatgtgagctattattattacaacaaagcaaaatagatggagaggcaggtttggacaagaagatgataagcttaggtttgggtatactggatttgaaatctgaggctcctgttgggcatcagattgggcgggtgctgggagtgggtgtctggggccctcagacagcttgtgagctggagctctggctgctgcttgttccctggccccatggcagctgacagacctcatcagggaaaatttgttgcaatgacaaaaatttccttgatcttttgctcaatcttggagatgcacgaggttgagttcttagattggaactcaaaggaataggaatcagaggtgttcaaaattgagttttgggctttggaacattcagggtgctttgtttttctttttggtgtttttttttttttttttttacactgaagtgagatagttggtcctggatgaggtccctgttgaaaatctgataaaaatatgcacaatatacaatatgtgcaaatacataatatttgcctataatttcagaattgaacatgaacatctgaagtcaatttgtggattcccacttcagatctcctccatgtccaatacttgttggtagcccctaatgctcaaaacattcattgacgtgcccagagatctatgggcagctggtggtgtatttttttaaagctggaatattagactgaggatacagcattgagcttcaggtgctgggaagagaatgagtataaatgctctgggaaaaacaaaagatggtacggctaggaggaaactggggatgagtttaaattcgaaaggaatgttagacaccaaaggtatttatgaggtgttttgcaggtcataaaaatggaataaatggttttttgaaggttattggcatcaagggggtgtagctcagtggtagagcatttgactgcagatcaagaggtccctggttcaaatccaggtgccccctatgacatacttttgctcctcttggcagcttcattaaaaatcctggactagggtaaggcaagcaaggtgcgtaaggctcaaaatttaagcagatacttactctcaggttcatgcaagtgccttggctcactagttcccttatagcagagctaccatctcacataaactcaccctgcctctaatatgcacacacaaacccagtcataaaccatgacacatacacacacacgtgtgctttcttacatgtgtctttatctcttctttcctgtatattcaatcttattaaccaggcactttttcctctccctttcttcaagttttaaaatttattttagatttcatggaagagtttataaattctgtaaattttagatttacagaagaattgttaagatagcaatagagaggttttgtataccctttacctaccttgtaacatgttaacatgttacataatcatggtatatttatcaaaactatgaaatgaaatgtttgaggtgatggatatgctaattacccccaatatgatcattatacactggatacatttatcaagatatcacactgtatcacaattattatatgtccattaaaggtaataataaaataaaacagacatgctggtccaacaccatttagttttatttttactttgtgtcagtatagactagatgtatatatttatgggttacatgagatattttgatacaggcatgcaatggtgcaacactgttaaccaaatgacagactattcagatttctccagtttattttttctgctattttttttctctgctccaggattcaatccaggataccatgttgcatttagttgctatctttgtaatgtctcagtcttcttcagactgtgacagtttctcagtcttttcttgtttttgtcatttttcttttaaccttgacatttataaaaaatcctggttaaatattttgcagaatgtcctcactttggatttgtcatgattagactggggttgtgaatttttagaaaagctgtcacaaggataatgtgccattttttttcatatcacatcaggggtggaagataaggctgcaacgatttaaggttctgctacactggtaaaacttttagggccgggtgtggtggctcacgcctgtaatcccagcactctgggaggcctaggcgggcagatcacctgaggtcaggagttcgagaccagcctggccaacatgtgaaaccccgtctctaccaaaagtacaaaaattagccaggcgtggtggctggcgcctgtaattacagctactcaggaggctgaggcaggagaattgcttgaaccagggaggcggaggttgcagtgagctgagatggtgccactgcactccagcctgggagacaagagcaagactctgtctcaaataaaacaaaacaaaaaacaaacaaacagaaaaaacttttaggagtccagcatctggggcatatcggcatatgccttctaaagtgaaagatgtagctatgccttacactgctcaccacacagaacaaggcccattgcttggtgggacactttggattttggtggcaatgtattttgatgtgcttctctggtatatttaccagataacaataacccataagactgtcaggttttagtggatcccagaccaagaaaagggtctgcagtaagagtagactatagtgaaatctggtcttccatttgagtgttatgacttagtattgaaagtgtatgcagtcataaaaaggaatgagatcatgtcctttgcagggaatggagggagctggaagttgttatcctctgtaaactaacacaagaacagaaaaccaagcactgcatgttctcactcataagtgggagctgaacaatgagaacacatggtcgcagggaagggaacaacacacaatggggcctgtcagggcgagggggaggaagagcatcaagataaatagctaatgcacacggggcttaatacccaggtgatgggttgatagttgcagcaaacaatgatggcacacatttacgtatgtaagaaacctgcatgtcctgcataggtatcctggaacttaaaataaaataaaattaagggctgggtgcggtggctcatgcctgtaatcccagcactttgggaggccaaggcgggccaatcacttgagctcaggagtttgagaccagcctggccaacatggcgaagcagaggttgcagtgagctgagatcatgccactgcactccagcctgggcaacagagtaagattctgtctcaaaaaacaacaacaacaacaacaaaaaattaagttaaaaaataaaaaaagaaaatgtgtgtgtctagaagctgagagcagtttggtggggtaggttgtggagatgttggtcaaagcatacaaaatttcacttagactggaggaaaaattcaacaggtctattctacaacatcgtggttatagttaataaaaatgtattgtatacttgaaaattgctgaggatagaaaatgactgaggtgagtctcaatcaatttagaggtttatttcaccaaggttgaggatgtgcctgggcaaaaggaacacaaaatcacagtaacatctgtgatctgtgctgttttcaaagaggatttagggacttcagtatttaaaggggaaagagcaggcagtaggggaaggaggacagaaaaagggaaggagagtaggtaagaggcaagtgcttgcactcctctgaggctttgtgcagggttcactgaattcacattttacatgtgaaaagagggggtagagaaatagtcaactatgcattcatctcttgctctgtgaatatgaatttttacataagatgaagtaaagatagagtggaggaagcagtcaaatatgcatttgtctcaggtgagcagagggatgacttctagtcctatctttgtcctgtacctgtgaaaatacagacaacactgatttatattgtcagggtaaaattccatagaacactgttttaaggtaaagatcttgggacccacaaggaatttccttctgagcaaattgtaagggaggcctcctagggtggtatgtgaacttctgtctttggagctatctatttagaaacaaaatgggagacagttttgcatgactcagttcccaagcttaacttttccctttggcatagtgagtttggagtccctgagagttcatttttctttcacaagatatacagtcatgcatcacttaacggcagggctaggttctaagaaatgtgttgttaggtgacttattcattgtgcaaacatcatagcaatgtacttacacaaacctactacacacctaggttctacgggatagcctattgctcctaggttacaagcctgtacagcatgttactgtactgaacattgtaggcaattataacacaatggtaaatattcatgtatctaagcatacctaagataggaaagacacagtaaaaatgccatataaaagattaaaatactactgttgtatagggcacttaccatgaatggagtttgcagaactggaagttgttctgggtaagtcactgagtgagtggtaagtgaatatgaaggcccacgccattactgtacactactgtagactttataaacactatatacttaggctacagtaaacttatttttaacaatttatttttttaataataaattaactttagctactgtaacttttttactttgtaaactttaaaaattttttttaaactttttggctcttgtgtaataatacttagcctaaaacacaaatacattgtacagatgtagaaaatattttctttctttatatccttatcctgtaagcttttaaaaatttttacaatttttaaatttttattttttttattttaaagaaatagagactgagtctcactatgttgcccaggctggtcttgaactggctcaagggatccttctgccttggcctcacaaagcgctgggattacaggtgtgagccaccacacagagtcaatttgtttgtttgttttttaacattttaaactttttggttactaagatacaaacatgcacattagcctaggcctacacagggtcaggattgtcaacatcactgttttctacctccacatcttgtcccactggaaagtcttcaggagcaataacatgcacggagctgtcatctcttgtgataacaatgccttcttctggaattcctcctgaaggacctgcctgaggctattttacagtaaacttttttttcttttaatataagtaggagtacactctaaaataacaataaaaaggccgggtgcggtggctcacacctgtaatcccagcactttgggaggctgaagcgagcggatgacgaggtcaggagatcaagaccatcctggctaacacggtgaaaccccgtctctactaaaaatacaaaaaattagccgggcgtggtggcgggcgcctttagtcccagctactccggaggctgaggcaggagaatggcgtgaacccgggaggcggagcttgcagtgagccgagatcacgccactgctctccagcctgggagagagcgagactctgtctcaaaataaataaataaataagtaaaataacaataaaaagtataatatagttaatacgtacaccagtaacatagcgctttgtcattatcaagtattatggactgtacataattgtatgtgctgtgcttttatataactggcagtaaagtaggtttgtttatcccagtatctccacacatgtgtaagtaatacattgccctacaatgatatgacggctatgacttcgctaggcaataggaatttttcattccattataatcgtatgggaccactgacatacatgcaatctgttgttgatggaaactttgttatgtggcatgtgactgtataaacaaatatatttcaaattatttagaaactatggtaatttattatgagacaagaattgggcatctcatatttaaaaagcaacttatttttgtttttctaaacaattttttgaaagattcaaccttgaaatgaagactaccttgtctatgcctatgaagtaaaacacagaatcattttttaaccatttttttttactttgaaaaaaagtgtttactgctctgtcttcctttctaaacctgtccatgtgattttgtgatcttttcccactataaaatcaaaatacctttattgtataaaactttaaacatacatcaaagaatataggtagaaaaaatacaatttgactggatctaaatcactgtttttattttaactgttgtcttttttatttgtagttgtgttcaggcacgtgaatgtgagtgggttgtttttgtgtgtaaatatttaacaaaaattggaatacatatgtatcaggcttatcttaagcagcatgtcaaatctttttggccttgactatttctaaggcctttggccaccaattcttccctggctgtcagtgagtaaccaaatgtgtgggctctacaaactgcacacagacaaaaatccctactgtcctttacctcctgcccgcactggatgccactcacctcccactcttggcttccctcttgcatttgaggtgtgtgaatccatgagacccacttggtgtcccacatgcggaatctggaaaggttgaggagttaatgcaccatggggaaaacctttcaccaatgagatacaaacattgaggggtaaattcttctccttgggacagattgtcccgggatgcagtatatcatacactctcttgagagggagctttatgagattaagcaatcagttgcgcttgttatcacgtgatggccagcttggaaatacaaccttgagctaacttaaccctgttttttggctgcaccttcttttacctaactcctgctcccagggattgcactctctgaaaaaatatagcacataagcttcagcttcaagctctaggttctgggggtactcaggtgtagcagacactgtggatgctctgccaattttcctcttagcatttaccacaatacttcacgctggcgggattccaactgccagtttctgcatctcttttcccaagggtttttctggcagccagagcctattctgcactcattcatggcaagctgaatgtgccagagaattaatggcctgtgggagcatacctccaacaatgactgacagaaattgttgtttaaatacccagattccttacaccctttgtgggataactctgagctgtgataccttctagatgggccctggagttcctcagtggaattaagtctggtttcccacagtataatttgcataataatgcaagcttgatgggttgctttccattttactttctctaccagtatattctggggtcacctcccaaataaagttgcacttgaattattgacttggggtttggatctatgggaacccaaaccaagacatcagcctaagatctaagataaaatttttcttctccttctccttctccttcttcttcttctttttttttttttttgagacagagtctcactctgtcacccaggctggagtgcagtggcatgatcatggcttatagtgcagccttgacctccccaggctcaggtgatccacccatctcagcctctgagtagctgggaccacaggtgtgtgccaccacacccggctaatttttgtatgttttgtagagacgaggttttgccatgttgcctaggctggtcttgaactcctgggctcgagtgatcttcctgccttggcctcccaaagtgctgagattacaagtgtgagctaccatgctgggccaaaagacataattttttttaaaagagttataaactgacttttaaaatgtaatagtatatcctattcatgacattagatattctgaaaattttctaaactatatggtttaaatgctacatgatatttatcatgaattaacaaaatttatgaaattaacatattggatatttccactgtttccaacttttttatccaactgtaattgatccagcactaaacagagctagttgagctttgtcccatgggtcagaattacaaattaataagccacagatggatcatttgtacacatgatggaaaagaaatactccatatggaaatttcccctgacttctatttaatgttttttgaagattgcggtgtagaatgggtccttagagaaaaatcaaaggattctcgataatattctactttaaaagaaaatgaattgcatccaaactttcattaaacaagttactatctctgtctcatctctctttgaaaataaatgactactaaagctcagtatgtggtactttgctaccttatggattgttttattctggggcaaattggacttttgcttacaaaggactgtacttctttcactgtaacacaattaggaagtctttacagttttattccagctccctgaaatgatctgaggtcagctaagtaactttactgagctttgcattcttcttatttgtacattggggataataatattccctttactaaataacatgtcaatagagtacatggcacatagtaattgccttgtaagtgataacaattcttattttacagtgacgtctttttcaatggtgaaaggagtagcagagagtggggcctaagaaatattaaggggggtgtagggacaagacacacagatgtctagttagattcaggggacatgaatggttctctgctcaaagatacctcctttacacattcttcctgttgtgacaaacttggtcccatacccctgaatgatcccagcctttctacccaaatcctactataatctagctcagtacttctcaaagtggattagcagaatcagcatcaccttggaaccggttagaaatactaatgatcagtttctgctcaagagctgctgaatagaaactctgggcgtggtgcccagtaagatgtgtttttaaaagccctccaggtgatactggatgcacattaaagtttgagaaacgctgatctatcttgaaactttaaccagacctacccagtcactcctcgcatagccagctcctggagtcctgcctaattcagattcccccctcttctagctttcattctgagctcttactatttgttttgtctcaactatgcattgctctccagctctgattttgatagctcatctttagcttcattctaagatgttggttctgacatataatgtgattttggcttgctccttggtatctgcgtgcttgctccaatttattttggtgcagtttatctcctgggacttcagtctttctggagctggaccaggaggccaatatttctactgagttccaactcctgcagcaggatttgcccattaccagcccaactttcacgctcagtactgccctgggctctacagcatgggagaaatagaagaacctctgcttctaggactcagtcaaatgcgtagttcttgctttgactttaccccaatttctatctggagttcctgccttcattcctagctcagtgccccatttcttctggagctggagttctgcctggctctttcattactcttagtagctggactcttgctctttagtcagtatattaatgatgtatttctgcattaaaattactccccaaacttactggcttaaagcagcaataaacacttattatctcacagtttcagagaatctgacattcaggaacagctttgctaggtgattgtggcttgaggtctctcatgaggttgcagtcaagctatcgaagggatgaagacatggctggggatggatgtactgcctccagggtggctcactcatgtggttgaaaagctaatgctggctattgtcaataagacccagctctttgccatcgatatgtccccataggactgcctgagtgtcctcatgacatggcatctagcttcccctacagtgagtgattgaagagagagtaagacatgctttttaggatgtagtccctgaaatcataaaccatgatttctgtcacaatttatttgttagaatcaagtcattaagggtagtctacactcaaagggacagaaattagtccccaccttttgaagggatgagtgtcaaataatttacaggcgtattttcaaaacaccatagttagtctttggagaaatcttcctgccagtatcactcagttattaagatgctgcactttgctggcccatttctggcaaattctagaggctgacctttgtctttgtccaggtattctgtactctacaccagacaaatagcccttttaatctttttcagtacttaatctaggttgaattgatattgaaaggaacttatattaattataaaattcagccatttattgagtacttactgtagggattgacaacaggtacatttggtcattcccttattgcctgtttttaacttggtgaatgtgacatgtcctaacaacaaatgcctttgtcaataagataataatttgagttaataagtttgagttttttgtatgctaacaagtctccagctgccacataaatgtatccagttagagcattacacaaagctgtccagctgagggtcagtagtggctaaaatccagctcccactctgtaagccatagaacaccctggttggggttgcatgtgcctagaggaaagggaagtttttctaatgaggactgtgaaaataaataaaaatcgaaactgttggaactttaaattattttgagtcttagagaaatgtgattatggggcctgagtcacatgataggcagctgtaacccaggcagctttaacctttgtttctccgattatagattagccttcttccttaactatcttgttttgtaaaatgttgtgactagctacagggcaccagggcagaccccttccctctaactgttgatcttcattacagattagctttcctcttacctctcatacaaatacttcatggttatcacattgtctaagacaaaatgttaagtatacttttttattttattgaaaaggaaatacaaacaagctgtatggaaaagaaaacaaactgtcactaattcaatggttgcaactcataaaccagcctcatataagaaatgtaaccctgttaaatttctttgttttgttcctgtgtaagcaaaaccctaacttttaactgcagagcactgacctcatttctccagagtctgtgtttaccagatgaccattaccagcttttcacttgaataaactctttaaaaatggattctgatccttttgattatttcaggttgatagcacaaatgttccatcaatttgctgagccttaaacccacagggctgtacccgactaggactttttttttcttcttctaattcttttgtaggtgtgaataggctaacagtggccctggttgtgtctttttccgtcgcacatgagagaaacccaactcaaactggttttagaaaaaaagtaacttaactgacaaacctaggctttgtattggctttaaacatggctggatccatctatcccaagtcatgttatcaggaatctgtttctctcctcttggatctgttttctctatgttaagattgttttcaggaagattccctacatgtggtggcaagttggtcaagtttactcactgtcctcttggcaatcctaggacaaaaggaagtttttcttctggatagttccagcaaaagtcctgtgatgaagtctcactggcctatttctgaaccagtcattgtagcattgaccatgaaattctctatttagctggaccttcagtctttgcatatttctggactaggagagttggtcctacctcattcaaaccactaagattgggagttggtagttatctaaggaaaggttggattttttttttaatcagaagaagagggacacagatcatggatggattaaaaaaattgtattttctatacaatcattggattcacacattggtgtaactagtcattatagagcagaattgcagagaggaaactgagtcctcagtcagggctcccagcagtacattgcagcctgggtttgaagaatgctcatggtatactttggatgtgttatttcttgatatcaccagtctttcctttagccttcttacgctggcttatttctgagtatttttctgaggactgggaactgatatcacaggtactcactcttctgaagggagtccaaagagtatttttctcctcatatataggaggtaggttgatctacctaagaaaaggctagaaggaagcttagaactctggtgctctaagaaattccagttggttgtgccacttctcaaaactcaaaagtttgattacaaagcaagtgcactagaggagtttgaggagtcacttgagtttaccctgtttcaggccatatgctttgggatggttcatacttggatcagggcgctaagccaatcagacaactgcatttctctttcttcagtaattgattaggaaacagagtgacaattcaagcgcagccaatgcttctcaaagaggctttacctgatttttttgggaaagggatcttttcttttgtctgtttacttcctgcaggccttgaacttgaaagcatgcaaagctggagcttttgtaatcaactgaaaaccataaaggcagtctgttctgtaggtagagctgccagtgcagaggatgttacagatgagagacagagagaaaaatacccaagacctggtgacatggtttcagcccctagagcaagtcactcctggacttttcaattgtgagacccagtaaattccttgtttttcatggtttccgtgacttgcaaacaaaagatccccagctgatgcatcctgacaccaagctgctccagtaattacagaggtccaataaggcccgagtcctatgcttagcaccaaagctcagttttcctacactctaaaccttaatatcagaattccatttagtcccttcaccctgctgagcatgttcctctctttgtaaatctctgataataagttatgccacccaccacctacagaggttgaggactaattaagaacacttgtgaaatcttttgttttcataaaatgttagcaaaagggctctgtacattaatatctcttactcttgattctcctgacttctttttaatgtcccttttacaaaataaaaattgttttttaaaaaatgactatctagattcccttctcaaggtgtaaacagctaaactaaaaatatttctctctctgacaagaggtgagaagatttagggctggactgggtctctcttttctgttcatttacttttcttcctcaatctttctaaattcttgacttttgggtttctggtactggaaagatatgcagttattcagaaaatgccaacatcagtgagctgtcaactttacttatttgtgttaaatctaggtttgttaccaactggtatcattttgagaaaatattccattgatttgtgtgagttaagtagatttagtatggaggaaattaacaagatacagacaccaggaaagaaaaggaaagtgaaaatatattgggaaggaagaggagagagagagagaagctaggaagcaacatgaattgagtcagaaaatatacttggattaacctgtgaccatgatgtcaaattttggttggataatagaatataggtaggggtgccagatttagcaaacaaaaatacagaacacccaattaaatttaaattttggaaaatgaatactttaaaaatataagtatatcccacttaaatattacatggcaatgctaaatgtgagattatggggatttttcttttctagagacaatgggttatcttgttagcatcctggaacctataggtgatacaaactgcagttattaataatatggtaagaccataggatagttgcattataagttcttggaacatatagcctcttccttgtttcaacaaatgcccttagcaggacgaagtattcatatgttctttcttacctctcatttaagcactatgactatactgtatgtagtcattttatatatgtatatattttatatatgtatatgtatttcatatatacattttatatattgtacagaaaatgtatatataatacatatataatatatacataatatataatatatacaatgtatatattatacatatacataatatatacaatgtatatattatacatatatgtaatacatacataatatataatatatacaaagtgtatattatatatgtattatatatacattttctgtacaatatataaaatgtatatatgtattatgtattataatatatgtattatatgttatacataatatatactacatataatatatacaatgtatatattatatctgtattatataatatatacaatgtatatattatatctgtattatataatatgtacaatgtatatattatatctgtattatatagtatatacaaggtatatattatatctgtattatataatatatacaaggtatatattatatctgtattatataatatatacaaggtatatattatatctgtattatataatatatacaaggtatatattatatctgtattatataatatatacaaggtatatattatatctgtattatataatatatacaaggtatatattatatctgtattatataatatataccaggtatatattatatctgtattatataatatatacctggtatatattatatctgtattatataatatataccaggtatatattatatctgtattatataatatatacaaggaatatattatatctgtattatataatatataccaggtatatattatatctgtattatataatatataccagctatatattatatctgtattatataatatataccaggtatatattatatctgtattatatatacattttctgtacaatagatattatgtaaatatgcctgaggaggtcacttttccttcgtgttgttttattagtggcaaatatgttatatataaaataattatatataattagttaaaatatataaatatatgacatatttttatatattttatgtatatatatatttattatagaaagtgagacagggtctcactttattgccaaggctggagttcagtggtgtgatcttggttcactgaagcctccacctccctggttcaagtgattcttccgcctcagcctccagagtagctgggactacaggtgcacaccaccatgcccagctgatttttgtatttatagtagagatggggtttcaccatgttggccagggtgttctcaaactcctgacctcaagtgatctgcccaccttggcctcccaaagtgctggaattataggcgtgagccactacgcctggccacaaaactttttattatgaaaaaatttcaaatgcacgcaaatatggaaagaattgtaataaatgtttattaccctgcttgaacatttgccaacattttgtttatcttatctgatatattctctctactacctttattttgcaggagtattttaatgaaaatcccaaattttgtgtcactcttagatactatgtttccttaaattttatatttccttttctgttctaaagtatattgtcttagtctctttgggatgttataataaaataccttacaaacttataaacaatggaaaattattgctcagagttctgaaggctgggaagtttaagatcaaggcgccagcagatttggtgatggccctttcttctagatggtgtcttctatctgagtcctcacaggtggaaggggcaaacaagttcccccacgcctctttcataatggcattaatcctactgattagggctctaccctaaagacccagtcacctcccaaaggccctacctcttaataccaccactcaggggattagattttaatatatgaaattgggggaacacaaacattcaaccataacatctatctcttctgttgccaagctttcacttttcacctctatttcccttcataaactaataaatataaaagtattctctcccctcacaagataatatctcttgcctttttcctctcggagtgttcctgcggtttgtgatctctcttagctctggtagcctgttcaggccttaaggtatctgttcggtattatgtggtcaagtagctgggaccacaggatcacaacaccacgtctggctaatttttttttttttttttttttttttttgtagagatggggtttcgctatgttggccaggctggtctcaaactcctggcctcaagcaatcttccagccttggcctcccaaagtgctgggattacaggtgtgagccaccacgtctggcttggagggcttattaaaacaccgattcttagcctcacccccagagtttctggttagtaggtcttggcagggctggagaatttgtatttccacaccttccttggtgatgtgttgttggtagttcagggagtacatgtgagaggaaccgtttagatagtaaaaactgcaaacctgaagaagaatagaagaatccttattctgtgctctcttagatttagtttcctcatctatgatcaataactattcatttcttcctcatttccaataacgatttgctgcttttaagagcaagagatcacttttccttcatgttgttttgctagtggcaaatcagaaatggtttcgccagtattcactgatcttgtaatcactctcggaatccagctgcatctctagtgtagagttttgggtcaacaagaataatgctgagcttaaagaattggactcagtctcttgaagtcaggggttgatgagaaggtggctctaatctattcattcaacaacttcctattgagcacctgctatgtgccaggtgctgttctagccactaagatagagcaggtaataacatagggccattgtccttatggaatttgtattttagtggggtgaataaaaaagggcagtctaggtggggcccagaaatagaaaaatagaaaaaatatagtgacgagtcaaagttaaataataacctgtatttttctctcataattctggagtccaaaaacctcatgtcatttccactaggctaaaggcaaggtgttggcaagaccacactctctctggagactctgggggagaattctttttgtcttttccagcttctagagcttaatttcttagctcgtggccccttcctccatctttaaagcccgcagcatagtattttcaaatctctctttctgctttcatcacattgccttctctttctcctattgtgccaataagagaagatagttcggggctgtgaagactgtagacacaaggtggaagatgatccaggaaggaggatgggaataatattggaaaacagtgatcataatctgctactggtgtcacatgaagttgtgtggtcatatagcaaaaaggataaacatttatgagaagtttttcacttgctaggagttttacagccattccttctttaaatttcacaataaccctttgaaggatatactgttttacacattaaaaaaacctaaggctcaaggtacaacttgccccagattggatggtcaataagtggtaacatcaggattacaaggtaagcagcctgcctttacagcagaaacctaaagaaagctttgctactctaaatatgttctgtggactagcagccctagggtcacccaggaacttgttgaaattgcagtctcaacctccaccctagacttgccgaatcagaatttgtattttaacaagagccctattgatccaaatacaccttaaagtttgagaaatattgctaaccaagcactatatttgaaatgcagtgaaactacattttcagctgctgtgaagctggctgaaatatcttcttttttggtctttactccaacaatattaggaggcctagtctgataagtcatttggctaagcaaataacaattaagaaaaccatgaacctccccaatttcatgtctctgggtctaacaaaggacaccacagtgtattctaaacagcagttacttgtctgctgagagctaaaatatttgctgactcagttatttctctcatctctgtgtgtggcaagttctagtgtgataaattatggaggagagagttattacaacactctctcttacatcagatgatagtgttaggcatattttgggcactgcaatcattgcacagcaggtagagaatctttcataattattgtgcttataaaatatgcttatttatagaagcttgtttttaccccaggtccttgttaggctgttactccattgctaaacctcagagtgtgtagttttggctgaatcaagaaatagaataatagaacagaagatggctggtagactaatgtttattatggaccacttgcattagaattacctggtgctggttaaaaatgtagatcttggtcgggtgcggtggctcacgcctgtaatcccagcactttgggaggctgaggtgggtggatcacgaggtcaggagttcaagaccagcctggccaacgtggtgaaccctcatctctaataaaaatgcaaaaattagccaagcatgatgatgcgtttctggaatcccagctactcagtgaggctgaggcaggagaatcgcttgaacctgggaaacagaggttgcagtgcactcagattgtgtcattgcactccagcctgggccacatagtgtgactctttcccccatccccacataaaaaaacatgtagaactctgggtcccacctggaaaattagtttctaggggtaacacctaggaattttaacttataacatgcttatcagacaactctcatataaactaatctttgagaattatcattgtataccatcagacctaacctttgttattatatggattaggaatcagaaaaagagagtagtataatgactttcagtgcctcacttagagttacatttcccatttccttttattatatacatggatatgtatatatcagtctggtatagatagctggctttttaggagaaacttttagatctactagtatctaataaaggcagggctagctgcttgtgagtcgctgaatgtgggataggcaagtgggtgctaaagaaacagtagttaaacttaaaacatctcctctcatgtgataataagcaaccatttgtcacctgaaataacaaatccacaggatttaactagagttaagacagctggctgagttccttgagcgatatgacatcgtgccacaaattgccaggaggggacagcagagagctgccaaatggccgtagatgccaggtgaaccaaggttatcagtaaggaggacgttagaatagcagccaggtgaaccaaggttatcaataaggaggaggttagaatagcagccaggtgaaccaaggttatcaataaggaggaggttagaacagcagccaagagctggctaccctaggtgtgtctgctggggacacacctaatttgggcaggctgaaacttagccttaaatgaggagagctgagcctgaagcagaggcagttacctacccccatgagaaaaggcaatgtctgggccagtgagtggaagagagaagctgaagtcaggaatgcaagctggcaagttaggagcgggggtaagcggtgagtgtgtcggaatgggatagctaatgggctgccagggagtaccagcttcttcagaggtagttatcctgattcgcagtattctgaggggtaattgtcctggtaagatcaggaaacagtcgggcttctgacaaagaaccacaaattaaaaccataaccatattatttaaaaacctggaacccaatcccttatttgaaaaaccctttggtagtgagattttcaaattattttcagaaaatgccttagtattaaaaacaaacaagacagtatatgattaaatactgcaattatagtgtaatcaatacttgctcaaaaagtttcagtaaaaggggagaccaatgaagctttgagtggccaaggaggacttctttaaggaagtggaatgtgatgatccttaatggatgagtatgacttaggcatggaggatattcagtgaggcaagggagaaaagctcagtctgtttgcaggcttgtgaggaggtcactcatctgtttccagagtgccttgagtatgctgtgggctggggcataaagacattagtttgacctttgataaacttggttttgtttggatggtttccaacaagttctgaagcaacagagtccagcttctttaaacaacagcagtgtatcatttacttgaggaagtaagtattgatgccacttgcatctgacataggtagcttccaattagatagtttgctagggaagatatagtgcctgattccttccagctggggcaccataatcttgcctctgaatagatagaatgtagtcagttcctgtctggatatataaaagatgataaaaggtttttctgagaatgctgtaatgagaaccaagtacagttaactatgcagttatacaatgaaggacacaagtgatacatcttctacccactaatgggctggtgattatcactgtaattgtggtctagaaattagttatgactcagtgggtagactttctttgtatatcccatctctctaaataatagatcatgtttggcctttgcttatgcatttgtctagaatatgtccttttcaatttttttaaattaagaaatttattttatttttattatacttttaagttctgggatacatgtgcagaacatgcaggtttgttacataggtatacatgtgccatggtggtttgctgcatccatcaacctgtcatctacatcaggtatttctcctagtgctatcccttacctaccccacaaccccgtgacaggccctggtgtgtgatgttcccctccctgtatccatgtgttctcattgttcaactcccacttttcaattttttataaaagttgtcatgcccttccaatataactctttaaagcagcagtccccaacctttaaggcaccagggaccagttttgtagaatacagtttttccatggaaggtaggggtggggatggtttcggaggcagtagattctcataaggagtgtacaacctagatccctcgcatgtgcagttcaaaacagggtttgtgctcctgtcagaatctagggctgctgctgatctgacaggagctcaggcatggatgctccctcactcaccactcacctcctgctgtgctgcctggctcgtaacaggccatgaaatgttactgtacctttaaaacagggtgcccctgttttaaagcactacctcgtattcaggttggtgacacagcagctcttgtttctccagtgtagaatgtttctcaacgttattattattactgttatttttggtctgagcaatttgaaagactaacctcttttccatttgtagcagtggctctctgtggtagtgattcttacagaaatggagatagggttggggtgaagtaggaaaggacatattacccatccccaaggggcacatcacagagattctgaaaaatcctcttctcttcttgaggtgcttttagctaaggagcattgctataacttcaggattcaggatactgtgttgtatgtatgtatatagtcatagatgtcttgcagtaatttgtgtgtctctttctgctgttggtttgggaaggatgttttaaaggcttttggtgaatccctttggtgggttcaatcacttcccatttgagatctaacatgaaggcacattccttattgggcagtaacaaggatgccaggatggttcttggacaacacctctatatttcttcctgacaacttgtttagaggaagctcagagatggttatttaatcatttaatgcccaatactgggatatgcattctttcaagaaggtatttccttctaagacattcctcaatgtctcaggacatccatagaaaattatttgaagaagattttaaaaaaaagggtaaggtcagttttttgaagctacatgaaacaagaaggataacttagatgaaaagaaatgaaccacttgatggcctccaaatggcagagagttattaaaagtaattaacaaatcaaatcacaggtgaacacagctttagtgagtcccggccaatagtttaaacagtccttataggtttatgcttattttcttttgaatagattatccactctcttcttttcctcacccattgtgcctctgcaaagtggtggtgggtgcattagagggtgtggcttatgtgaccttggctggttgttgttggtggtggggtgacattcttgaactgcggattgttttctggaatcactgtgatctctctggcagaagggctgagctgggttgctcctcagcttggagaactccaaggacaacaagttctatcagaggggtgttccactgatgtctgccgttgatgttttctgcttctctgctcccatgatctggccgctcttattgcacgaggtttccctgttaacttagcccccaccttggttcttgctatgctatgggtaaccatgaagtctggctgggactcctccattgtgatcacttctgcgaaactttccagactgattttcaagagctttgggaagcttctagtcccgctcatgggaccagaaggcagctttggagagttaactgaggccttttctctgcctaattgtttctcatcaaatttgatttgaggccaagtgctcaccctggtgcaagggcagattgaggagtatttttcttgtttgcaaccacaagctgaacagaagtcttttcctttttggaaattcccttaactcccttttactataactctaatctctgggactctaagccacagaggtgagactgagatagatcttgccttcctctacctcctttgttaattataccatccctcaggttgaaagtgaacaactttgggctttctatcttctctacattttatattctttctgcctagggcagcaagcctcatggtgagctaaatatacaaggagtagcttccctaaggtgtatcctggctcaacatgtggtccatgggtcaacagcagtggtagcacctggaagcttattagaaatgcagaatctcaggctccacctggcctgagatggatcagaatttgcgtttttaaacaaaatccccaggtgacctatatgtatattaaatgtttagaagcacaggtgtagaagaaactgcatgatctagcttacttaggcttaggcctcagtaagttaatgagggttaaaaagacttaggaaatcttttttctcttgaaaaagcttgcttttataaaccattaagttgctacaaaatcctattttggaattttgaagctgaatattaactgtttttcttcttgcataattgcgataataatcattagccttctcaagggaaatagatgtttctggcagactacaggaagttcagtatgtggaaatgcaaaagagaaaattattttatattaaaatattcttattttgaaaaaagagaagaaaataatgagagatgaataaaatggttaagttggtcacaatataatttgttatacttaagtttttctttgataacttatgtatataagctataaaagagttatataaaagttatataaggttatgctgatactgtgcagtttgttagcagaaagcaaattgatttgtgtcattatattcatgcatcttaaagtgtatttcaccaaaatgctctaaaaagggagatttcataatcaaattagtttggaaaatgctgtaaattatatattcctcttgaagacttgcagtaaacattatcattataaagatgctccaaagtcctgcgaagaatccttctaaccttatttaacagtttccaaaactcatttgaccatggaatcctgtttcatgtaatatccattagcataccacataacttgtgttttctgaaacatgttttagaatattctaaaaactcttatattaactataaaatgattgctaagtctaacttatggtgtcctgaaattccacctggtaactcataactagtccagactgacccaagattcttttcactcctcagtaaagtcgaggggctataggatctaccgaactctcttgaggcaatgcaaccacccttgcctccccagtcctggacccagctgctgtgccttagatgtatttgtatctggttcttgttttttgccaatttcatcaacctattcagctgacatcactgattgcttgccttttcatttggtttcaccccagatgctacctcttagatctctttgaaattgagaaccaaacaggtgataaataagccaacatcttccacccataacccagctcaggctcccaggctggattcctgaaattcctgctgtttgggaggaaagttggacaattactgaagtaaatatatcttaatgagtcagtaatgatcacctgacagctgtaagggacaaagacatggctttgcaaacccaaaatgaggatatgtcatttgcaaagaatttctatgtcactccctggcatagtcttggaaaaattttcaaattcagtgtgaggccagtcttgcaatttcaggttctttccattagtattctatagatgaagaacataaatgtttagaaagtatggtgtctgagagattttttccccctttttctcttacactgtaaagaatcttgtgtttgaaaattgagcctcattccacaggaatgcgtacagccagttgtgtatagacgaacattaaatatattccacggaactagttttggtaaatattagtcagaagaaagtcctgtggtccaaaaaagttgggaactgctggagatgttagttggaatattggtggggttaagatgggataaaagaaatgccagaaagccaatgagttgtcagagagtggttgaatcacatacccaagctcatgccatgggcttgtggtacgtgggatatgttcgcttgtccctggacttgggtttggctatatgtcttgccttggtcaatgggatgttagcagatctgacatgaacagaggcttgacatacgcttgtgcaggaatttcctctgtgtagttgctgccactttaggctggctgggccccagaagctgacctgaatccaactgatagctcaaagtcaagcccagccaactttcagcctgaagcagaggtgcccagcagagcccagcctagatcagccaaattatagtaaccagcagatttgtaagtgttagaacaaatgtttgctgtaggccatgaagttttatactgggttaaacaaagttaaacaaacttctctattatattatttcttaaagactttaatgtgctaagtacatggcaaatcattaagatgatcatagagggaaaggcgtttcccgctggacccttatttttcagaacaacacatcctaccaacgcaggtagagatataactagagttagcccctatgggaagagtaaatgaccctctcttcccccaccatcctcccaatgcagcagacgcacagaggttcattctgagaaggattgctaacataatggctttcaaggcagagagctattgggtcacaggttaggaagaatagtttggggtgtgaagaggggaaaggtgaaaattttgagattactccacattttatcttcatgcacaaagctgttaatatagctatatcaaattatatctatatcaaattatattcattctttaagacatggcttcaatgaacagtattaagtggaagacgcacataatctctctgaggcaaagaatgtacctagatgtgaggcatgtaagaatgggactatgaggtgtgacaataaagtaatctatgaattaccatgcctgctagtcactgggatgtgttttctaagtttatcaagtgcatcactttcctttatgagggctgtaatggagctgtcgcctcactgaaaggagtcttctgcctttggaaggcctagggtgggcaaccttgtcctgctctgccagaggtctcaaggggaaatgttaaattttcctcctgggcacacgtgttcttgggtttctctttccttcttactcttctcattggtgtgataaaacccagatgctaactaagataaggagaccataaaagccacttgcttctagcctttgggacataggttggaagaactttttctgtttttccagggccagaatagtaaatattttaggctttgtaggtcataaaatctctattacaactccttatctctgttgttgtagcatgaagccagccatggataatacttaaatgaatgagtgttggttccactaaaactttatttataaaaatagacagaggacaggatttggcccatggaccatagtttgcttctttggatgataagttcttgcagctagcatacttctgctttaagcccaccaaagtgcattgtaaagaaaatgcatttttctgagatttcccctatgcatatcttcctcatgaacctgtggcacaaagtgttggatttgcagatcctgggtttatgtcattttttctctatctttttctttttcagataggacaaaaattaacttgtgatgttcttgtgagatgagcatgtcccataatagtttcccctattttgcaaatgctctgtatttacttttaaattttctacaaaagagaggatgttggaaagcaatagcaaaataaattgcagtgaattaaatattacaacttggttaactgcaaaaaaaggcagttaaattagtaagataaccatgactgagacataagacactggtgtattgcttgtgctttagaaggatagtcagcatatttggctttgtgatagggcctactggcttagtagaactatgaattcaactctacactaatgaaacccatatcatctgtacaatagcattcctgcatttctgtgcatttgaaattttaatgacactacctcaaaatacggcctagatttcttcctttttgtgaatcttctaagttttgtgccatcactacttcttatagtataactgcagatagtgtgttaaagcaagctgaaatagagttgcacaagaagtcttgcctgctgttgacgatccacttaattgccagctttgctagatcactcatcatgtaaccccaaaacttttctaaagaaacaaccagaatcaaggggaaagatctgactgatgccagcatatggctgcacttttctgcctttccaatggcctcattttcagatgtgcaaaggcaaagaggtcctaggaacctccggcttagttccacagtgagcagtttctccagcgactacgggaatatgaagaatgcaagcagagaattctggtactaattaaaaaaatctctatcttaaattttaccctattgactcttaactatgaaatataattagataattttctgtctgattttctccccagaggttatgtgtccttaaatctcctcatttcaatgtctaatgagtaggatcaggttcatgcttattagctggttttcttgaggtctatgaagccatttccagggtgaaaaaccacaggaaatagtctcaattaggagaatgtgagtaactttcttctaaaagagtccaaagtagtagcaggggtacattttctttggattagttcttgatttcagtatgtaaaacaggcaggttttctgataaaaacaacaaagtagagtctgttcaatacgtgaaggactttgtcaatgatccaaacaccaacatgaggtagattactgtaattgctgcttctatgacatctttatgacagtaataccttaaatgacctaatgagcttatcagaagggatatgtttggaaaagcagtttatttatgtatataacatattatatctaataaggtcacaaggtcagattttatttgcctttcttttgggcattcagtgtctatctcacttttagtaccagttctttgggaattttattggtaaaattttactctccgtcttcagagagaaacatgttacctaagccagtcaactcatcgcatgccttctagctacaaagatgaactttgattgggtcataggttcattgctaagccaatgatatatgtttggactgtcactgagacatgggatggaaagaagcagtctttctactgggcttgaattgaagagaatatagatctttgcattgttgcagtgtgttgctctcatgtgaatgctaagactggggttaatacttagaagacagagccagtaaataaaggtttctgggaacatccttgaagccctgattaatccatatctgattgcccccctgacacagaattttaaattatataagataataaattcccttcttgcttaaaccatgttgggttatgttttctgttacttgcaagcaaacaaggcctaaatattcagatacagatgaccactgttcaagctgaaaggaacctgagggttgatccccttcgacttcttattttacagaaggagtaagccagggtaggcacctgtcacatagtctggtggtggtagaagtacatctaacatctgggtctccttcctttcctaactttaaattaagaactatatccatcattggaggtgagatatttttaagaaagttgtttaattttttaaaattattaacctttagatatgccagttttgatgtcagttctcatatacatttatcttctagaatacaatcactgctggcttgccaactaaagcaaacaaaaataagagtgattgtaacaggcctttggcttatttatctgagattgaaaatataatatctcctatggctatatgatgggcctgtaataccctgacctctgctacctcaaaaatacatcctacccactggcagggtaagttgattttgaacccaactcccacagtgacttctaatcagcctaagctctgtgacctgtgaagctgagcccctattctgcatctcctggagatggcctctgttcaggcagtcaccttctctgctttgaaccgagcccctggtcatccccagggttgatgcagagtctgatcttcagccatatttcccttctgacccttgctgcactctctttccaggaatgtttatatatgatttgaactgtggttctccttataaacttctgcttatgttcccttctgcctcattacagaatgtttatggtgttttcctgcaaaggtggcccccaggactcctctgaccacactccttgggaattctggaatatttctttttcggaaatagagcaattgccctaattgctgccctcagaatacatttagctactacagaatacctgagggcctaactgagtttatagactcaagaaacagtaaatatgagccaatgtttaaaaacctatggattttatattgtgagtatccagttttagtctagtcttgaaagttcgatgacctggcaatactgtttccccattttcacatgtcacaattgatggataaaagtttcagttgccccctttggagagggtatgctgcagcccctctcattcctgctatctggcatccagctttgtcacgcctttaccttatatgtcagtccagtgttcctatgtgagctggtaacctcttcccaagtttaactggtctaatcctgttctcatctcagttaggtattattaatgactcttatcctcaaggaagatttagttctgaagttctctgtgtaattcagattattcacatactgatttaactggtcttaacttatttgccatatatatgtgtgtgtgtgtgtgtgtgtgtgtgtgtgttttggattataactaccttagcaagataggtacttagaaatatctcttgattcggcatttatggagtagctactatgtgctagcatagtacaaactttctaaatgaatggttcagaaaccaccaattttagaatcacctctggtgcttgctaatgcatgttaaatatatagattcctaggctccattgtagatctaccataacacattatgtaggtgtgaggccctggagtctgcatgttatacagggtactgtttgaaacttacctgtgagcagctctccagagtgggcaatagtagcagcacccatgctagtagcagtggccgtggcctgagcaaaatgataaaaatgtgttccagaaggaacaatacctagaaattctgctggccagccctctgcacagtggcccgtacagagtgatggggtcagctaggaggtaagcaagcccatcagagtgggccatggttaaagaggagcttgattggaagaagaggggtagtgcttatctaagattgggttctctgggaagcagactctgagatttgaatgcagagagtttacagccagtgctctccagatcaacccctgggtgggaatgaaggaagaacgactgggaagaaaggaaagttgaactgaaatgcagaaaaaaaaaaaaaagcctcagtcagcctagagggagctctgggtctgggatggcctttcagagttgtgctggattgggccaatgcactgggctcctatagtcccccataaccaatcactggatgtgaacagcccttgagaagacagagtttactttagtcaaggttgctctcttcagctaagaggtactcagctaagagccttcaccctccactatttccagcatctaaagctatgactattttagtcctggaagagagactctgggtagcaacacaatagtacctactgtggcagagtttggcaggctatggcccaaaggccacatgcagcctttcatgtattttagcaaatatggttttatgggacataaccatgttcattatggctgttttcttacaataatggcagagttgaatgggtgtgcctaaagtatttactatctggcactttaacaaaaggtttgccatagacacctgatctagaaagcagcccaatccaaagtgtcttttccaacagggattttgatgtcactttccaaatactgggccagtagaacgagggaagggacaggggaaagtgtgcagtaaagggaacatttctgctctggcagtaggtcacagcagaaaatctgcctcaagccatttaggcataaggaggtaacctcttgaggattccactgagaagacttgcaagcttggctaagggttttctttcctttacatgatgggcaaagaaggaagtccataattattttcaccagaataatgtgatatataagagacttatacattcatactttaaaactcatttgctactagaaaagagttgcttaacttagtgtctcttgtgtttaaacagggcctgtgaaataaaaggtttgggatatcctggaaccctaaggttcatgttagaagcaaggagaggagccattgctcagtctccatggtgagagacaaacacatctgaatgcccagtcagccaagatgggcatttaaaacaagcaagacttcccaagtactagtaagagcttgttcatttcagtggagtatgtggtgtttctttattatgcacttaaaataggtagtttctataacaacagtcttaacttaaatagatgcatgctcatctctttgttatggaggataacatttcaaagacactgttctcctttgtaaatcactttcaagacagaaaaagatgttctgactcataaattcataggggactgagcctgtctcactaaatctcctccattaaactctccataaactcctccataaactcttagtattctggggcagaaccccgccacttcccaaggccagcggccattttcctctgtgtagcagtacaatcaattgcatttgaagtcttggatctgggctgagacagttaaaaatgcgagacactcagtatgaatgatcatccatgagccttcagtaggggaagtgggaaggaaggttcaggacaccatgtaagcatcttgaagggtaaaggcagtatttcccaaatcatgagaaaaatcaactacaccagaatcacctggagagactgactttttacaaaagactcctgggcttcaattcaatccttccaaattggattctgagagtgggacccaaaaatctgggctttgttcaaacaagtttttctgggaattctgagacacaaaagtttgaggaccggtgatttagcttatcttctgttccattgctgccaacctcattcagaggaaaatgtgtttaaatggccttcaagaagaattctgtggaaagataaaatcatcatgggggacttatattctggtggatttggcaatgtggtagtgatcccattagagtttatgattttatgcatataaactgcaggtctttaattattttaaattcagccaacaaacatttaggcatttattgaacacccactgtgttgtaggcaatgtggctatgctgtgtgggtaaaaagtatacagggacggttgcggtggctcacacttgtaatcccagcactttgggaggctgaggcaggtggatcacttgaggccaggagttcgagaccagcctggccaacatggcgaaaccccgtctctactaaaaatacaaaaattagctgggtgtggtggcgggtgcctataatcccagctactcgggaagttgaggcagaagagtcacttgaacctgggaggcagaggttgcagtgagcagagattgcaccattggactccagcctaggcaacaagaacgaaactctgtctcaaaaaaaaaaaaaaaaagtatacaaagaatccctaccctcaagtaggttacagtctggcaattgtttctacttcacagatgatagattgtggttcagagatgttaagtggcttacaaagatggactgctgataaatgacagaactgggactagttctgaattcttgactcctgtccaatgagttcaccttctatctttttagataaaataaggcccttaaaaatagacttggcttgcaacaagctaagaacatgaagaatcatactcagtatatctatcccactttttaaatgttgcagccatctttctcattaacattggaaatacttctgtcatttgaaaatgcttctgactatgcaagtccctcactatgatcatgttcaagcctttagacttactagaatgaaaggattctttcaaatgaggttcctggaaaactttcataagtacactctcttaaaagcaggtcacagaggacagtgtcaaatactgtagtgatgttgaataagaggaaatggagatggggccattgaacattggacttaggaggccattagtgaccttagggtgagcagttcttatccagtggtatggacagaagtcagaaagcaggagcatgaagaggagctgaggaaggagtgggagaattgtgctgagttcagacagatgttcaagataaatgtgggcaggtagatggtgggaaccaaggtagggggcaaaactaggccaaacaaatagaaattgagcacaaggaatggtgggttaaagctggagttgaggttatttgcagagatgcagagcaacacccagaggctggtgtttgcagttgcccaagtgggcagaccaagccttgttatagggggtggggctgcacagacagttctggtgtggaatcttgtccctgagaagccaaacactttgtttctctggcatcattgtgcctgacatttgccaccagaataggctatgggatatgtctctctatggagctttttctacacgataagccacactgaaatttagaggttgaaaactaccaccattggtttaactcacaattgtatgggttagttgggtagcactgggctcatgttggatctgtggtcagctgtgggtcaggtaggaagctctacttctggagctagtctggctgctggttgaggctataggggtgactgggccatgtgtctctcattagccagcaggctagcctgggcttgttcatgttgatatagtggctggacagggttccaagaaaaggaatgcaaggtctcttcaggcgtaggcttggaactggcacaatgtcatttctgccacattctcttggccaaaataagtcatgaggccaggtcagactcaagggattagaaaatagacttttgatgggaaaaatttcaaaatcacattacaagcaggtctggaggcagggaagtgaataattggggccacttttgcaaacagtctacccaattgccctctgcttctatgagccggcagagcccatcaaattggaatgtaagtcacactttatagtttgcacagaaaatcaactcctcttctcaaggggcatatctgtccaggcacctgctgagtgaattggtggcagctcagtgattacatccccattgcttggtcttaggcctggagagcaggcttcttggtcctgattaccttgaacatactctgtagtcctttgcatttgaaatgcttttggtaattgcttgctacccaagggaaccagttctgggaggaatgtataacagtagcagaaatgaacaatacaaaagaggcaatcaagccctatgacttctgggaacatccaacacaaaatgtcatctcaactctactccctgatctctttctgaggagatgaccaacagtcccacaaaactgaagtaattaagtagttaactctctaggtgatggccttggcagaccttcatatataaagaattttgcctttctccttcattgtcactgtgctgatgggagctgcctttaggatttctttgtagttgaacaaagctggtgatggccccagtgtacttagtgaaccccttttatgggatggtgcttgaatgccagatatgttgctccctcttcacagggcatgcggccaccattaacattcctcttacaccttttgtgggaattacaaactaattacagaatgtgtaattaagtgcttcatctttcaaatgctgaaaaaataaactgagcattcctccttttgagcttgattttagtattggtgattagcaacatgattcactctgaaatgggaggggtgtgctttcaagtataccttttgctttttcaagtataataaaaatattggaagctcaggacaggtttgttttcccttccctagaagtagagttgaaaggaaacccctttcttcttatcctttgtgaatgatcattttattcttattggactagtgaccaaggtcgtcatggtccatgaagcataagacaactactaacactcatgtagcattttacacttagtgaagcttgtttatacccatgtctcatttcatactcacaataagcctgtaaagaaggtatttttattcccactttacacttgagaattctgaagctcaaggactttgtatgattcagtcctgctgctagaaaaaggatgaatggggtctttagccaagtcaatatgattttggaattccatgtgcttcctcctccaatgtagaagagggaggagtcagccaggtaaatcctgtttggggcatgccttgaggtactccatttcatccctagaattcttctgtgtttgatacaaccaagtgcttctctttgtgatatgtggtcattgtcattgttccacggacaaaagtagagttatggcagcacgaaatagacaggcaaacttacccattaaaggatgttgatgtaacattgtctgaatgctgggatttgatcatgaagtcagaccttattatgatttccccttaaaatgacatgaaaagtatagagcaagcctctctggacatgaggctgtatcaaagtaatcatgcattttaaccctgtgaacagctacattaccctccccacagttcttccattttattatcttgtctctgtttttttttttttgtctctactagattgtacagttggcacatgtttacatcccaaaacaggcagtatgtgtatatttaataaaggaatcaatggacatttctcctttcttggttttggagaatgaggtctaggagatctttgttggaattttcagaaactgccaatgatcttttctgtagtagatgttccacataccacacccatatcccactggacacccatccaactgatagcacttgcatttctttgcctgagggccttatctagtcactagagtctgctttgccctgcactgggcaagatagaagtgctagagagttgacatcccctgagagaagtccttgccaatgaatgatgggagctggtcggtatgtactccagctccctcacccctctgggaggttaactttgaggcacatggcctccaaagttttttcggtgagactgagccccagttacctaccgtggtagctgggttgttaatgtacccttaaaatgctgtcttcgttttctctctcactccacttctctcctattggtattttctttatctcacgaataactacttgcattcagttccacttgcagcaggttcagggtttgcttcggagggaatgcaaactaagaaacctttgtactggagcattagagacacttccctttgccaagtcagtaagtgtttgctgaatgccaattctttgtgaagttccatgtgtggagagcagggtttctcaactgagttctccaaactgggagctgatcataatcctgaaagatcctgaaaatacaattctggaaaaataacaaacaacactactgtttttcttttttctttatattaattttttgtagagacaaggtcttgctatgttgcccaggctggtctcaaactcttggtctcaactgatccttcctcctcagcctctcaacgtgctgagattacaagtgtgagtcaccacacttggccactaaaggacattgtttaaaagatatttatttgttttgaaaagatttatttgagaaatatataaaaacgtgacagaacacttcataggccactttacacagcaaaatacacaataacatatttttgcaagcataaaacaggtatggtaaagagtcatgcaggtataacaattacaagcagacaaactatatttataaagaaataggtcaaaaatggaaatgtaacaaactatagaaatgatccctgaaagtatagtagtagggtggggggagggagagggatagcattaggagatatacctaatgtgaatgacgagtaaatgggtgcagcacaccaacatggcacatgtatacatatgtaacaaacctgcacgttgtgcacacgtatcctagaacttaaagtataataaaaatatatatatataaaatggaaatgtacaaatgtatattactgtggttggtaattgtgtgaccagctttataacatctgtcatctgaaacaccgtgacaaataacctaagtcttttgatatttggtcaaaacctgccatgggtcaccactgcatatgcagtctctcaaataatcgagatcttgagagagtttatctttcacaaatgcagatgtacaaaatggacatctcttaatttactgaggaagtttcaatgttgttatatacatgcacaatgcttacacacaacgtcaacattttgataatacactttacatagagtcaactctgcaaaaaatacataaaatgaattggaactctctaaaagtctctaagcaatttatatctccaatattgaaaatgatgcaaatatgagatatgtagcatagcaaattgtaaaacataatgctgacaatttaaaatagtggaaaaaaactaaaaaaggaaaaaataaccccagaaaaccccccaagaaatgaaaaagaaaatttgacatatggaaaagtatatggaaatagtttatgggcaattgcatggagatagtccctaagagctgactgattttcaccatcattgactatattttgaagtcttccacagtgaggcatggctgcattttttcttttagggcacgacccaccttggagaatatgctcactctggtgctgctctttttaaaattcttctatgatttgctgtaccccaacatgagcattttctattaaaatttctcatcttctgtgccatcttccatgttgctttgaacatgtggaaattcatttcccatgcactcatatacagaccaaaaatttgggagaaacaatattggcgatggaacagcaacactgttgcatgtcttcttattcttctgtgcatataattatttttgaaccagtctgtaacttcattaggcttcttcaggcaaatatggctttaactcataaaagctcaaggaatttcgtcagctggaaggaataccaatgcagacacatgatgcatttttaaactgaagttttcatctttgccgtatcacatggccaattcactcatttgaattttctgtcaaatgcattgggctgaatggaaaaaaacaattattattggtaacagcttgaattcactttcagaagccttgactgtatataattctaaatcggtcattgtgctttgagattcaattagacattaggaattttagactgtagggatttagactttagggattttggtcttttgggatttcaacattcagattatggcgttcaggattgcgtcttttgggatcattatccacaccccatggagaagtaccagggtgaatcaggaggcagagtgtgtcaggggaaagcatgggtgacagtgtttattgtggttttcatgggaaggaatgggtgagacagggtcatgaggatcattttaggattagctgtttgaataattttagcaagctctggaacacagggactgctcctacttggctgataactggccctgtgataactagggtaggcaagtagtatagtgtatactagactattctagactaaaatagtatagactgtggtagcctaaaagggggagaactggttggtttgcatatcgagggcatgctctcagaaagtttgatatctttaagaattagctaactctgggaggggcagtccctcccagatccacacgatgtcaaagcctcataaaaatagagaaaataaaaaaacatgattaatataatccgcttttttggttcccagccccacaccttcagtccctggtttacaactcatcccttgcatcctggctagctaagttaccacttctgtttggctttggaatcccatgtgtgaattacccctttggagaatcctgatgagatgaatgccaagaccgtggatctattcctatctcttggcctgtgcctcagaggattagaccctgtacagctgaagatgttctctttttaatacctccctggattaagaaatgctttggccaccgaagaaacatagagggctagactcgactccatcatgcctcttattgcatataagttaatcaatagccattgattagctatagaacattgatttctatagaacatgggccatctggtcctgcatcagctcccagccaggatctgtctggcagtaccaggtcaagggatgggtgccacagaggctacagtgagatgtggaagcacatggctagatccagccatttctcgggaaaattacccatctttaagaggctcttgaccccaataaacaggacacagcagtggctatgtctggctttgtggtctgaaccaaaagcttattggattaaattaattcataggaagggcttataatagtgcctggcatgtaataagccctcaacaattattaaccattataattaatcacttttacagtgcctgattcttaatgaagactcaataaatgatgccttaccactactaccaactcatgctaccctgcacataccatagaatttaaatgaattcaagtgagaaagtgatcctgtaggcttttggtaatctgcaaggcaccaaaacagtacaaggggaaaaattcctggtaataactgcattcatgattttcgaagaaaatgagaaaaaaatagtagatatgtataaaagcattttgaatatctgactcctgtaaagggttataaattgcttagcagggttaaaaaatacattctctttggggaaaccttacattagacatgctgtgaaattaagacttttagtgacataagaaaaacttaaaagtagctatagaacataggtttattacatgttgatagacgttctagaatgtacattttgagacaattcacagtaattattccttatgttttcttattcattatcttagaattaagagactatttttgaatttgaaagctatgtaaaaaagagtgaggttcccattgtttttcatgtaccctaattattccagagaaagtcagccaggggctaagaatatttcataaaaataaccagaaatcagtttgttcttatctctgcccccacttgcctagtgggacgttggtttcctccaaagggtcctgaaagtccctgcagcagatctcaaacgtgctctccactcccctgccaaacctgcttttagcctttttcctctcatgctctgatctgctgtggagatttcttccagccctgccctgccactgcctgatggagtggttgctgtagaaggctgttatgcctgtccaaaggctgctggcactgacctcatgtgtcctgtaatgtcaccacagaacctgctgctgctaatgtccccttgatggcccagggagattataaacaaacaaagctatatttactaacttgtttactgcagctctctttctccatcatttagactccagtcttcagaggttagggaaaaatctgagagagaatcgcatcctcttctcagggtccttccccccacccctctaagcctgggcccctgtccttgaatcacacccggcccgccttttcccctgggccctagtattcttcagacttgtcctgacagcctaaatcccaaggtgaacgcaatttggaactattcttagacccctgctgctctattaataaagccccagttggcaattaattttaaaaatcaagcggatctgtttatttggaaaacaacccaccttacaaagaagttgacagagtttctaattccaatagatccttataattccctatcaggaaggctcccaaacagtgcaccctggattgattttacatgagatgcatctcaccatgggttctggagtctacctggatttgaatcttatctctgccattgatttacctgtgcaacctgggaaaggtgcttaagttctatggaatttatttgtttataaaatagggattaagaaaccttcttttctattttttaatgtctgaaaaccattgttttatagattttctcagttttaaatacagtagactttatttttgagaacagttttagattttcagaaaagtcgaggaggtagtataaagttcccacataccccataccattttctcttttatcaatatcttacattaggatggtacatttgtcataattaatgaatcaatattgacacattattattaagtaaagtccatagttaattttatttctttagttttcccctaatgtcccttttcttctttaggagcctatccaagatgccgcatcacatttagttgtgatgtctctctagggtcctcttggctgtggcagtgttttggactttcctaggttctgataaccttgacatttctcttcttcttcttcttctttttttaaaatatcttctttgtaggttggttgtgagcactaattgctatatttgaaacgtttaatagagaatatggcccataatgagaccttaaaataacttgaaagaagacaaagaccattttaacctataataatgagggagggctttatttttgtgaattcaaaggaaggacagaaaatgggatggatacctcaagtgtactttaaaatgtaaaattttggcttttaattaatatttgtcacaagcaattcattttcctagtacaaagaatgtgaggaggatattactagttgaggtgggacaaattagctagctgctgtacctttaacctgggaggtacccatcttagggttgacaggtgcagcagataaaaatacaggacaccaaatgagatttacatttcagggaaacaacaaataatctgttaagataaatatttctgaaatgttgcatgggcgtcctgtatttcatttggcaactctaatccttctttctcgccttgggagattctggcaccatgtgactttctgctctggacattttaccagatgtcttgatgattgactgtgtctcccatgtccacgtcaaaagatcagtaacagttacccggattcatatatcatgacaaagaaaagcaaaaccttctaaaactaaactctggagtgtgggttatgagcctgctctgtttaatagatgaggagatactggctggagggcttttaccaggctcaaaccttgagcatcatcataattcttagtgcttaaaagggcagctcagaatattcagcacctgcctttgtggctgaaaccagccccaggaaacacttgataaatagtcatagttattaatatttgcccctatatcacctagttccactgatcacctgtagccatctgttctagttctgctgtgtgagaagctttgatggaaatgcccattaatcacagcatcacagctggccttttgaggattgatggcaattagttgacaatatttatttgagaagctgtattactttgtgattatattacagaaccatgagtaaatcatgctcctccctaccccttttcattaataataagagccacagagacatgcagaaattgccaccatgtcttaattatctctctaggaagctacttttcctggacagcaggaacatgttgggagggggctgggcaaccttagtcctggaaattgctcctaatatttcctaggaacatgacagtttggagcttccttggggcctttaagtggccacctgccttcccatagtaatagtagatcctaagtgggcaagctagaataattaataataattcttaggggtggggttatggagatattggccaaaagacaagagaaataagtttaagaggtctattgtacaactgtacaataaatgtgattatagttaataacctgtattgtgcacttaaaaatttctaacacagtaaatattgttttcatcacaaaataagtatgtaatacgttataattaacatattacaacataatcaattagctcattataatcaagctaatgcttgatttagccagttcaaaatatatacattaatcaaaacatgatgttatataccataaatagatataatctccattggtcaattagaagataagtacttcgaacacctcactgatggaagtttgcaaaagtcaataataaaaatttgcacttgtaggggtccttgcatgactccttcatgcattttatccctttgtggcttcatagcaattgctgtaatccccattgcacagatgagctaaagtgtgaggatttcctgaagataattaaacttttaggattggagtttagaccacctgactatgaaaccaggccacattctctctgatgtccctgacttagttttgtgtccactttctagggagagaagtttgtttcttcagcacttgaagaacaattttatgatctcagaagaaggtgtcattcctatttggcctgatatttaggttaaggcattatggaaatcagcagatattacaaattatctactccctgaagccagtttttaaacaactaccagcacaccattgctaacccacaaaacagggcttatctctgctctcagtctatatagttattattttctaaaagaactctttgctaaatttgcactgttcaatatgggagcaacaggcacatacgtccattgaacacttgaaacatggctagtccagatcgagatgtgctgtaagtgtaaaaaacacactggattttcaaagacttaatacaaaaaatgcaaaatagttcattaataatttttaaaatgttaattacacgttgaggtaatattttggatatacttaaataaaatagagtgttaaggctaagttcatggtttatttgttttttttcttactgtggcttccagaaaatgttaaattatatacatggctcacattatatagctactggataacagtggttaggctataagcttcctgatgacagaaaccatgtttcctcagtaactagcaccccatgtctgctacatagtaggtactcaataaatatgtgttgactaaatgtatggaaaggggtggaggaaagaaggtggctatataggcaccttatatggggccttataacccattgaaaagtataactgttagatttggaaatgtatatatagaactcatacatgcagaccaagttttctgccagaggtgtaacaccatctgtggtctccttttagagggctccctgcttctgtaagaaaagatttagtgactgaaaacttagcaccttaagagggcatctgcccctgcccgtgctccaacaatccccactggatagccttgtgcacacacacacacacacacacacaccccagcagctgcttctttcttggtgagtagtaactccaggttctacctgacttcctttttcttgttggcctccctccaggatcctctctctttgcccagctcccataggtttggtaatgtattagcatggtcttctgggattttgaattagttaattcccaaggcagtactgcccccttagttgctccctcagcttcaaatatttcagctctcaaataagggaagggtactgtttgacacctagaccaagctttgtaggtaaagaccattggcttaaggcggcatccagggatactactcagaaagaggaacaaggacagcataccttctccattgtcaaatggcatttatgcatggaaatgcttccctcctatggaattgaatctgtctcccagaaacttccacccattagactatcttccttttcttcctactcaacctctcatcatttaataaaagtagtcaatatttatagaaacatttccatgagccattggctctcttaagactcttatatcactaatcttatttaatcctcacaacaaccttatgaggttgttagtattattaattccattataaggatgaaagaattgaagtttagagaagttaagtaaacttcccaaggtcatccagaaagagtggcagaactgggatcgactcaagttctgatttgaaagtctattagctgcatttctatactgtgtttttttttggatcagctaattctacattctgaacttctcagtctcttcacggcttccttcacaaatctcttcctgctttcatatgataatctttcaagagtttgaagaccgaagtctcttcctccctaaatactagtcataagtcatctatttttttcagagtagtcattcttattgtgtttcctcatctggttctggctgtctgaccagtccttacaccttagctcaatatttgtcatgtaccattttagaattagttagtatagaggacaggttggtatatgagaaagtaacaacatatgctcttaaataattttcacatatactgtatcttatttgagtctaacaacaatcttgagagatagtcttaatatttttagatttgatcacagtggatgagaaatcaagtgacttatccaaggttacacagaatgaattaaatagagctttaaacttagatcttcctatgaaaagttcatctttccttttactttaagtacactaataaatgatgttgagatccttatgcatatcagcacattgctcccctgggaccttggactcatgaactcctgcaccagagctccttggaaagcctgtaagacaactttgacagcccgattcactctttaagaaatattacaaaggctttgccatttatttataaagatgcaagtttttgaaagagcaactgcatctttctaaaaaggctcacctttggtggagaaggtcacttggatggctcagaaaagagaaatgagactgaaggaaaccattacaaatgctggatgaaaacgtatagccatgaaggctcctggtggagaaccttatttgtaaagtacctgttatagtgtgggctctcaataattatccatttgaaggacggtgttcacagagccttataaaagtgaagactaacctttctctggataaggagcaatcaaagcctaataagttgagatcatttctcaaaccttagaaatatttagggacatagctgaagctagagctcagatttacttatttgagccagctctggctttggttatagcttatactccagcagaactccttagaaagaccttttgaagggtttgtaaatggttgccgtggtaacaaggttccacaggcaccattgggatgctggtagtggtggtgaagctgtaatcagtacatttgaccattgctcctagtaacacagctgccttatttttccatgggaaaggactggggtatgctcagcagctaacaggttcagatagaaatgaaacagctccatgaaaggtatctataaaaccaccactgacttacatcaataggcccatctactaagttttcagcactttcagaagtagtctttagtggctctctgccactagagtcacgatacagttaattagcattattttcgctgttagatgagttctcacaacttaagctagtttgcagcccgttttgcctccactaattcactgggaaacagtagtacaattgttcctggatggtaatgtgaatacaggttgccctgattttatatcccacttaaccacaatgcatgtatattgataagcataatggatgccaatatactgctttgcagtttaccaagtacttttataatcattatcttatttcatccacacaagagccctgggaagtatttattacccacattttatagatgaagagaagaattgagcctcagaaaatggaaatgtcttattaaaaatcacatggcttgtagtgaaggggctgggacacgattttaggtcttttcaattgcaaaactctgtacttactacttcactgtagtgcagtacaaggccctttgcatgttgtctctgcctttttctttctgttctttcagagccatcgaatcctctttattacacgcattgtggaacaatttgcctagttctccaaccaccattctgcttatcaaatggctgcctttgggttctcatccagaactctcctttagctcattgtctccctggaaagtgtttattcatttaaaaaactcaagtaaaatatcacctcctctacaagacatttttatagcctcttgtctttattactaaaagactcgttattctaatggcatttgttttcccatgtgtctctcccattaggctatgaacagattgtgggtaggacctagtgctcttttctcttgtattgccaggacccactttagcttctagaaacaaatagaaatggaataaatacctttagaaatgaaaggcccacatgtacttctaattattaaacataattcagtttcatttgatttatgtctgtgtcattcctttctttgcactgacatgtccttgcagagggtgatctgtgtggcctctcctggtggcaaggcattccatggaagtggtttacaagaatactatgaagtatatcatgaaggcacatttgaatttccatgtgattatcacatggagattccttttcctcagtggccaagattattgatatttattattgcttcccactcttcagttttcagtttatagctcctaatatttttttttaagaaatgtgtcttaaaatcactgaggacagcattccatttacaaccattgttacttggaaaaatttgaaaaataacttgttcttggttcaataatgctgagcaatttacaggtttctcatccctttataagaatactagaaacaattcatttttttctcagtaaaaacaagtttttcagttcagtcattgtgaatcccatacttgttcttctcagtgaagataatggactgagataacaccacttttcctgaatgagaataagagaatcacaggcaagttgccattggattactacagctttgatttggctagagttttcgtagctctcctcctttatatatgattataaaaaatttatgttttctcatttaaaagtgtcttttagccaactacctgctaagaatcagaatataggagatttaaatatcatgaaacaattagtgaatgctgcagacattatgcattaccttcctttagtccttgctaataggaccacagtataattcctggcagcaatatgtccagtttcaatggaacacttaggatttgtgtaaacatattatggctttctggctctcctttgccagataattgctatctctgcctccttggaagctagggatagaactggaatgtcaatgtcctaaaggaaaaattctctaacttggctgttcccacccctattgcttcttgccttgggaccttcaagtgacaagtctatgataaaacactgaatccttcggaaggtggagaaaaggatagtagttactgaatttttgaagacacatttcacctgctgagccacccatagatttttttacctctgggtttttaaacagtaaaccatggatgtcttttaaagttgaagctactggctgttagactttttgttatttgtagcctaatgcacactgactgatgtaataaaagtgaacatcatatttccacatctgtaacagccacagactctaacccagggtaaggacaagtctctgtcagattatgaggtgctcctctacattctctgcttaagtatgtgccacccatttatttataaattcagcctacattcatttgcttttaatacgtgttcttttctctgccatctaggatcttctgagcattttgtttaatatttccagataacagtgagtactaggtgagcctatttctatcccagcattataatgaatactttacttttcagactgtatgactatctctttggtctaaagcagtactatctaatagaaatataatgagggtgacatgtaatttttctaaaaggagaaaaatacatgtacattacaatacaacagtaatatcttatccaatgcaatggttagagtgaaacgtaatcctaccaaacaataaagttgtgtttaatggaaaaaatattttgcattgcttcagttttaaaatgaaaattaaataaaattaaaattgtagttcctccattgcaccggccacatttcaagggctcaatagctacatgtggctactggctactgtattagataggtcagacctattctctaaactccttgagggcaggaactgtgttctatctaggttttaccttagttactgcttcttctggaacccttttcaggtactccaagatgaggttaagtgcacctgttatgtgctcctacagccctctgtgctaacttctatggtggggtgcttatacagcctgtgttgcaattacttatttccttgcaattacgttcattttctgaagatctgtgtctgattctgtgcactggagtctgccctactccctcagtctggttggtgctagggcctgtctcggacttgctgagtttcttctgcctccatcagcaactggttgtatgatcagcctcactgcagaggcaatgactccactggcttcctgagcctgggctccccctggagtgcttcatcatggcttatgccttatcttgatttacatgttgtggtctcctgatatagactggcccaaaaccatgcttgtacagtcttgggatttcctgtttcacctgccagactagatttcctcccaaggcaacctcaatttacaattgtttgggttgtaagcaacagggcactcctccaggggatattttcttgtagtgactctagatgtgaatagttattttgacaacattccagcagatggcagtaaagtgttttgagcaagggttacctttttctaatttgcacaaggtccccgaataaactagcgtctgtgctgccagtagagcccacctgtaaacctagcagaagatctagttgcagcttcttgctcctttcctctcaccccttatccttgtagttaatcacacctggccaggtatagaggagatgtagtaaattggaaaagcctcatatttggggaatgagatacatttctttaatctcatttcctgttgccaagcatcacaggatactgctgcagggaccacctccagcttgcctcagtccttgtactctgctttcattccctttctttctgtagtcatgtgtagacaatgcctacactctaggatgattctgattaagctgcttgtatggagcatcagtttctttatgggcaccaattgtgtttatctctacagattggaggaacattctgtacaggatttgttttttaagaaatccatttaaaaccattagaaggaaagagcagagaaatgaaagggcactatctagtggttctaagagaaggaaggtgctgaaatgcttatgatgctaattttccttttagtctcagttgtctggagtagaggaatggtatctaattgttagagatgtgagagatctataaagctgtgagcatctctatctgcggaagtccatcatcaggaaaaatgcatttctttaattactggctcaatgaagatgcatttcaaagtgcatttgggaaggagaatctataaccaccctcctgtaggcctatactccagccctcaactcagtaggttccagggaagaaagcacatcacaacatgtggcattcactcagtctgttctgtttcacagagctgactttatcccagataaccgcccccttctccccaccttttctggaaatgcatttctgcttaagagagcaaactcagtcattatctggtttggttcctttggggttggactattacagattattttttgatggtttgggggtcaacttgatagagggatacggcatcatgacatactgttcaggagaactgcctgctgatttggcatggtggaaattttctcaactttctttctagaagctatgtaacagatatggctaaggttaaagggaatttgtcacattgtgagacattttatgggtgtgaaatggttctagcattggtattcattgtcaagtagttatgtagctttggaaatttgtcctttttggatcctgcttctcttacattaaatgtcagatatgaaagagaaatttctggaattctgactttgcatgttatgtaatctggaacatatttccactgcaaatattgaacttctaagaggaagaatagcaaatgcctggcactttgctgccaccttgcccatgatcaattccactactctaattctcttggtctaggcttaggtgtggactcagaatctttctccacacagtgcctaggaggccactaccaatcacttgaagttgaccttaaaggtggaagcttcttgctgatcctggatggtgagaattcaaggttccacactgttcatcacattgaggtttccattttcttatcagcttctaaggacaatttggttttcatggcaacagttatcttcacagactcaccaggataaactctcatattcaattttcaacatatgtcaaggaataaatatctgaatgtgaaaacaaatgaaatgaaatgcagcaaacagtaacaataaggacagaggctatatcaatattaatgaatgatgtttgtgctatgctatattaagtaggagagagagaggatttataaaaaatcttaaatttggtctggaagagcatcctcacatctcagtatagggaaaaaagtcccgcttggctaataacatgttagcagttcatagtctcttttcttcagggacaagaaccactatgttcaaggccttacatcctatgtacgtttatgctaatccttgaatcttatttaaatgcagtattatatagtcagtacttattcatggtatccattttcactggtgattctcagactttatgggtaacagaatttcctagggagtttaaaaaaatatgattttgtgggccccatctccacagagtttgacttaatagatctgaggcgatgcctaagaatatgacttttaaaatcaagtccctcatatttcttaggtcataatttgcaaaatggtcaccatgctcaggtgaaatatttctctcttgagcctaaagtcaagtatgatggctttcatttgtcatgtaagtggccacatggtgcaataatttaattctgtggtgctcagcttgcgttacatgttaaagagtagattcaggaagctgtatggtgaacagtggtggttcttgagaatgacccctaatggcaaaaatattcatctatctatgtgataatattacacttttggtatcccctgatggaaaaacatatggaataataagatgctatgagttcagtaacacttacagccatctagatttcattagtcccaacagcacttatgaacattccaaggtcttggtgtatatatgtttgaaatatatcatgtagttaatcaacacatggtagattagaagacctcatgaaagaatttcatatgctaacccattccatgtgtcctcctctctaccctaaggggttcttgacagaaatttgaatttttcagaataaggagaagcccagaagacttgagtttgaattatacaaataatggatactggctgagtcatatagttacttaatccataaacctaaatttctgtaaaaagatgatgacacatatatattagatatgcttttatttccaattcagagggtacatgtgcaggtttatttcatcggtatatagtgtaatgctgagatttggagtacaatttatcttgtcacccaggtagtgagcatagtacccagtaggtagtttttcaggccttgcccccactacctcccttccccttctagtagtcctaagtgtctatcgttcccatgtgtacccaatgttaagctcccacttataagtgagaacatgcagtatttggttttctgctcttgcattaatttgcttaggatgatagcttccaactgcatccctgttgctgtcaagaacatgattttgttcttttttatagttgcatagtattccatggtgtatatgtaccacattttctttatccaatccaccattgatggacacctatgttaattccatgactttgctattgtaaatagtgtggcaatgagcatataagtgcatgtatctttttggtataataatctatattcctttgggtatatagaccatggttcaaatggtagctctgttttaagctctttgagaaaggtgatgttaattttgtatagtatcttgcaggtgctctcttgatttcttatgtctggatgtctacctctgtagcaagattagggaattttcttgaattattccctcaaatatgttttctaggttgtttgttttctcctttctcaggaatgccaataattcatagatttgcacaataccattacataattccatacttcttaaaatcactttacataatcccatacttcttgaagactgttctttttttcaattttgaagccatttttttttgtgaagtggttattaacaagtctatataaggttaggatttccaattaaaagttttaaattgaaagccttcaaagttcagttgtatgtcatgtagtgaggagtagcactgaatttggcataagacttaatgaccttacttacagcttccaagagatccttctccaagagatccttctcagtagcaatttttcaccgtgctctgatggcaaacataccagcttctgtgcagacacttctaatctcagcagcagtgccatttggacacagtcgtgctaacaattcaaatctgatatatctttcaacactcattgaatgagcgtgaatcttaaagatgtgggtccgaccctctagatcaggcaagctaaattcaatttttctgtctaatctgcctggcctcatcagtgctggatccaaattatcaggtcagttagtggccatcagcactttaatattgcctcgaggatcaaaaccatcaagctgattgatcagttccaacatcgttctctgcacttcattgtcacctctagcaccatcatcaaaccaagcccctccaatagcatcaatttcatcaaagaagataaggcaggctttttttgttctggtcatttcaaagagctcatgaaccatttgagccctctcactgacatatttctgtacagctcagatccaataactcgaatgaagcacgcatcagtctgattagcaactgcccacacacagagtgtcttcctgtactgggtggattaaagagcagcatgcccttgggaggctcaatgccaagattcacaaacctctctggatgaagtaatggggtttcaactacttctcgcaatttctcaatctgctccttacagtcaccaacatcactgtatgtgacaggtttttcctccacctgcatcatggtaactgttgggtgagtcttaggaggcaatggaatgtgaatttgatatttatttctgtccacacctactctcatcccttcttcaatgtcagtgggtgccacctgatcactaaagtccatcacaaacttggcaaactgctttacattgacaatgtattttgggtcctctgaatcagcactgattatctttgtacacctggcaacctgtaaaggttgtttactctggagtgtctgcttatctgcagccaaatcccagagtgctggtggagccaggccagtgtcagattctttaataccagtgagctcattaattttcttgagaagttgctgaacgccatcttcgacttgcttgatctgcctaaagtaagtgctgtgaccataagttttcagcaaggcaatatccgcctcatccagaacttggatgggcttgtcatccttctcatcatctttggtcttccgctgatgggcaccaaggtaatctggcattttagcagttccaaatgcctctgctccttactgattacatagcaccttcctttcttctggtggtgtctgaagactgttcttttttaaaaattatttttttctttatttttgtctgaccagattagttcaaaagaatagtcttcaagctctgacagtctttcttctgcttgggctagtctattgataaagctttcagttgtattttaaaattccttaggtgattccagaagctctgattgatttctttttaagatgtttatctctttcttcatttcctggatttctgtagaagtttctttgtgttgattttcaactttgtcttggcttttgttgagcatccttgctccatggtttgaattatttattatttctgaatttccattttggtcagggaacattgctgaacagctaatgtgatcctttggtggtgtcacaatgttcagatttttcacggtgccagaatccttacactggttccttctcatctggagagtttggtgctactaatttttgtatttattttcatgctggtagaatttttttttctttccctatatatatttccatttctcccctttcctagaggatgggactgtagagtgtgttgggtaacatcttttggctttgcttctataaccctatgcatttttgtgggcagttttatattgggctgtgtgattcaacttacaggccagtagacggtgctgacaggtatgagccagttgctgcacaaacagatgggtatgtacatggtctgtttgctgtgaggtgctctctgttgttttacatgatgggctggacagtagagtgcttggtgccctgtgcttcttgctctgtgggggtggagaaacaaagctaggcagagttggagcctttggcttgcccacaaatacccccatggtgagtgcgggcaccagccctgtcaagggtggctgggaggagtccctggtgaaatgcactgagatctctggggcggggcaaggagatgagggatctgcactggctccccatctttgataggtaggaacatggtctattttcctatcatgcccctgttccagggctgatgactcctcattcagacacacactgtagtctgtgtctagaccaatgtgtctgagagcctcagaaaatgcctcttttgtgattctccattaaagtggtttggggcaacttcatcactcagcctgatacaaatagctttatggcagggctgttctctgatatgatagcactgcttctttgtgtaaaggcgggggctatgcctttgggcttgtgtgagaagtggtcaggtgccagcagaatttgaatgggataggtagttcctcagtttccaggcccctagatggtccgctggactgcatgtatgagtcctgaagggtctggagccagatcaggctagcccaggattcaggtgctgactgcgatagagaggggcaggctggcccctgggtcactggatgaactctcaggcaggggcaggcagaatgcttgggtggtaagaacctgagggaagacctgtgggggtagggatttcaggactctagactgcagctgaaatgctcatgtggaggcagggtgcttgcactgggtaccagaagtggcaagcaaaggcagggagttgtggggtgtgcagtctgcccagttcttcatatctgggcagcggtgtccttgttggagatgtgtgaaagcattcagcctctttgtttccacctcaacctgagggcaacaggggcgagggcagagggtttttcagttatatctcttggagttccatcccacaggaccccagagctgcaactttctacagtatccaagcaggggcagctgtgctgggagcctcaactggtggtccctgcctggtgaggagcagcagaggtggggtctgcagttggtctgctcctcagtactgtggctgtagcagctatcctaggggcttgcaaaagagcctgtcttgcctgtcttcccttgttggcagcacattgacagctggtgtcagactgctctgggatccagtgcttgtggtgctccatgtgggcttgagagatatctctgcatggactccagatggttcttcttgttggtctgcaggcccggatgggtcgggggagttctcctgtgcccaggattgcaaagggtttgtggggacattgtggatccccagtggctgtaatcattcactttgttcttctttgttctctgtgggtcccattgcttctttagtgaatcgcaatgtgttctcttagaatatccacttgaagagccagtgtttactcacatttgtttcttctctgtgggagcagctagcaggcatcttcatatatatatatatatatataatatgatctcgttctgtcaccaggctcgagggcaaaggcctgatcatagctcacttctatctccaactcttgggctcaatcaatcctcccatctcagcctgctgagttgctgggagtacaggcatgtaccaccatgcctcagcctcccagatcattttgattataggcatgacccactgcacctgggtcctaatgagtgtgatataaagattaaatgatgtaatgtatgcacaatttttgacttgaagtaggctgtcaatgttagttttctttcttctttcaaaataattaacaaaatgaatctttaaaacaatagtcccaggagaatctgaagctttaagctctttgttttgattcagctccagtgttccagaggctttccttgtgtacatgagatagtttgggggactttctgtttggtgttatgctggtgctcttttgtcctatgctattttcatggctgtcaattgaccaagggtctataaacacagtactctcacagtaatctcacgaaaatcaggtgcagaattggagtgggcttctacaagttattggtatctgacgctactggtcattaaaatgattcttgtcacttgaggaatgatacagaacaaccaccaaccccatctcctttcactcaaagaggagcacaaaaggtatcacccataattagtgtgttttgttgttcatgttcccaagtcaaccctagagatggagccaaggttatcacatccacatggaacattctttttcacctctagtcaggagatagcaggaggaagtttgtgtttctctctttttctgcaactatgctacaatttgacactgaaaatactcaggctcgaggtttaatttgaatatctatggtataaaattaccagtgttcacaccccctagcattttcctgacaaattaattgccaatacaattttcagcagtgggtatgtgtggagcgaggcagggttgagagttcagcttatgggaggtaattataggtgcccttggctgggaaagagcacagatgatgctaaaggagccaatgttttgggtaagcagcacctgctcctttgccagctctgtagacccatggatctgggaaacatatataatttggaggatttagggtctacctttggtcacataatttaatctcttaatcatcgtgtgttctgtggttgccgtgagctctctgaaactgaactgtgtgtctccattacttggttcttagatcttttctccatttattcaatactccaagccttcaaagcatcaggataaagaaggcaaacagcaaaactctcaaaggcagagagtaaataaagctataaagagattcttcattttggctaggtctaagggaaggggcacttttgttgatatatctgaaagtaagtggtctcctctgaaagaggtggaaaaacattctgttgagatgaagcacctgaccttttaagaaataatctctgcttatttctaagtattcattggaaaacgatttatctcaaatatacacctttagacaagatgcattagttcctttttcaacctaagcctctcaggagttgtaatcctctagcatctgaagatatttgctgttggggttattttaatttttattttatttaattgtaaaaacaataataaaaaccaagcagacaaacaaaaaccttaaaaaaccctaaactggggtgagggaggattggaggagtagatggttgaagaccagaacagatataaagccataaacatcctccttaaactttttcaagttttaaaaatactagcaattttatagatttgttttcatctcaaagatatttttgaaaataaagggttataacattattatgtgacaaagtaaaataacagagaagtgcacatttgattccattaagtcttgttctcaagtttttcctgtgatgtcagttgcttttaaaaatatgaaagatccagtgagaataagataatatttctggcactctagtccctgcaataatgggattggagagaaaggaatgaggatatttgctggccaaggttaatatacaagggtttcatcctgtcttcttcatgaatttgaatctcatcacccaaatatctcagctacaaggattctgctatgttttctggaaaacaagtccactttcagaactctcaccaagttaatcacagtcagaagatgccaaggttgggcaggaccatctactccaactctttcatttaacagatgaactaaggtccatagatggacaagggacttaccaaagattgtccagcaggttagtttagaataagggctagaatctaggttttctttaaagcagcaataagcaagtgctataggaataatcagttgcttcacatggatgtgggccctgaattcctaatttggaaatcagttgtgctctacaaaattcacagattcgtgatgctatttgatacaaatgtcatcgtgttgacagtcaggtggaccttggaaagaagagaaaaagagaataaacatttatggagcatctactattgcaagaaacttccactttactattgcatgtgattttcacatctccctgatgaagtggatattatttctatttttaaatgagaaaataaaggctcagagaagttgaacaatttgccaaagaccttgtagatggtaatgtagaatttgaacccagaaatatgattcaaagcccatctaaagtctttccattcactcaccactttttgcttcaccccattacatcattatttttgctactctttccaatactaggcaaaccacaaagcaggatctagatcattagccttatcattgaatgcaggcatttatggtgcatttatcaagtacttagttttgtagtgggtgtgtggaaatgccaaagggtaatgagacctttgtgtaactgagaagggctttctaggtgtaaaggcatcagataagtgtggccttctatttcaactcgcaggaaattcattttcccatggtgtgcaaggccctatgtccttgctactcaaagtgagctctatgaactagcagtgtcagcatcacctggtagctttttagaaatgtagaatctcagcatcccacccccattagattctgcattttaacaagatttccaggtgatttttattcacaatcaggtttgagatgcacagcccacctcctctctgaccttattgcccaggtatagtagccttctttttgcccctaaacatgcttacctggctcctgccttatggccttggcatttgctgttccatttggctgaccgctttatcttctaatttttttatgactctattttgttcttcagctttctgctcaagcaatattgtctcagaatgtctgagtgctgacttccagggaactgcgttatcttgttatattttctcatagtatttattctctgaaattataccatttatttattcgtttacatgtttattatctctttcctcactagactgttaaactccattaatgcaggaatgatttgcctgtctattcattgttttattcccagcacctggaacactgcctggcccaagttaggcattcaatacgtattttatgaatcaataaatgaatgaacaatggacaatatttcactgctattgaaatttcgacatgttgatactaaaagctaagattatttgttttatctaaccaaccatgaatcaatgtgacaacaacagtttggtgtattttctggtttaagttctttgatgctgcaattcatgaatcaaggaaagctgcaggagaaagaaaattctctttttaaacttttgtcaatttcataaaaatattgattttgttagggtggcatttggggatttcagacatatctgtatagggaagtttttctcttaatatcttttcagcaatttcccttgaaaaatgcagatgtatggatttggcacaggcaaaagtactatggaaaccttcccttttgattcacaggcacctacaatgaagtggtttgtttcttggctaaaaacaccagtttagagagagttcatgcatacttcacgagctgactctgcaataatacactgcagatcttgctggaaggaacagcaaaggtaactctctgaattctgatgagacatcctgggaagaactcttacacctactatttatgagagcgttataaaaaagaaaatgagaaagaaaaatgatttcacacttaatatatgtcaggtgacttagaaaacaagatctcattttaattattgtgacaactttgtgagataatatgaccccattttacagagcaacaaatgaagattcagaaattgagacttgttcaaaggcatctttctagtaagtggtagaactgaaattcaagttcatgttctttccatcatgttgctgtcccattctcagtgaaactccatcctccaccaacttcccactatattttgcagttgcctttatatggcaactttttttgtgtgtgtgtgtgagccaaatttccttctggtttcagaagagcaccctagagactaatagcctcataaagaatttatgagaaaaacagaagtgatggtgcaaaatcttcagtactgcatggacaggagatgcttagatctgaggtgaggaaatccagagatgaatgttttgtttacctcatgggattgtggcattgttagccactcaatccaaccagattataatgtattaagaatttgaaacatcagccattgtggtttcacatacacagatgtatattattttgttagccaggtaatgacagtcattgtcaagtggaagatctaatcagactgaatattcattcatgccttgctttgtcaatagggaaaaaaatttcaaggacaatcggatattctctcagatgactgaacctttctttccatctacctgaaggcgaggaaaggaggagggagggaggcttggacagcacatcctccccgattagatccctgccctaagccctagccctcttttaattctttcatatgccaagaggtcattgtccaattcctgaatttcattgctcaatgtgtgacagaatttgggtaatgccaatggtgctcatctgcaactttctggaaatggcataccttgagcttttacaaaactactttaaaaaggtttcgtttgagtttagagacttttggaagactagagctttgtaaaagatacgtttttgctcatctcctgattcattatccattctttcaggaataagaattcaaaagacaggagggaaagttgctttcttttagattataaagttgctttctttagtttataaaatttttgttaactccagtatcttccatggctcagaggggacagaaaaaaacaaaaacaaaatcaaaaacaaaaacaaaaaaacaaaaccagccaccaaatgattagggaatgatttttctcactttattcctattctgctttctttctcacttagaggatctgaatgtgtcctcctcccctctctgaacacattgtgccctaagggtttttatttggaggtcatttgcttgttactcaaagtctccttctacttgaaatgagttttcttgggagtgatggtgaaatgcccagaaatgtcttcttaacctttgatgtgcctaaagttcagcatctcaacactattttaataaaatctaggcaccaagtacagcattgtttctacagataatgaattctgaattcttctttcagtggagttgtagagactgaaatcattctttgggaagcagtaactcatctctttgttatcctggactatgagtgagggtgatcttaagagcctgtacactttgttgttcttaaaagggcgaagatgggtagtaccctcccaggggcaaatcttagcctctccctatccaggactttggaaatcccattttcaaactagaaaatgctttaccttaaattcaagtctccagttgtgtttgtatctttttcagttgttgagtaatcctgtcttgggcaggtgcagtcccatgataaattatagtgtttaataataatttttatcctttataaaatttatatgggggaaaattcatgtggaaaagggttaagaatacagttcaagggggtagcagaatcagatgaaaacattggtagtgggtaattccctaaaaatcttttagaagccatgggtcattattatcatcagctgactgatgggacacactattctttctatattcaggccttgtctggtctaaacagagaaagagtccttcagtagggttcataaatatctcccaagacctttgggtccaactgaacaatctgatcttattacaaaacatattctcagttttttggtaagtctcagaggaatagaaatattaagttatagtggtaagtacataagagacaatgaggctctgttaataataagctattgccagatgtacacaagaaccatcctactgagtatttggtgttttctcccagagatttttagatctttcattcatttatgcatttgatacatacttaccgagaatcttttacatgacaaatacttttgtagataagaggttggaaaatgatggcccataggccaaatctagctcatccaagttttattggaacacagccatgctcatgtgcttacatatcatttggctgctttcatgctacaatggcagaggtgagtagttgcaacagaggctatatgatctgcaaagccctttatagaaagagtttgtgaacctcttttctcaataatggagagacatccatgacctaaatgagccagcattttggggagaagatatggtgctggagacagagacaataaacaagtgaataaatatactaagtgctataaagtaaacaaaacagagtgatgtgctacagaatgagtaggagatggaggagaacttaaaattgtatggccagagaggccttcctgagggagttacatgtgcaaaggtatatctgagtggagggaatgtacataaggagatctggagaaaggtcattggagctaagagaatagcaagagcaaagaccatggtctggaattaggttggcatgttcaaggtgcagaaaagagatctatttgtttgaagtggagacagtgagaggtagagtgataggcagtgatgtcaaccaggtagtcaggagctgaatcaatggggccttataggccacgattcagcatttggattgattctaagcacaccaagaagcctttggagggcttgaagtgggtagtgacatgacctgatgatgcatgctttcaaagaccattctaagtgttaggaagtgggtgggaggtgagcaggaggggaagcaaggaagctgattaggataactccaagtgagaggggatgagagcagtggtgatgatggaagtgggttgactgggtacacctttcagagttatggccaatgaggcatgctaatagattggatgtgaggagtgaaggaaaaagaggattaaacatgactcttaaatttttgaattgagcaaccaagcggagggcggtgtatttaagtaaagaacacttagggtagaacaactttggttaggggaggtggatggagttctgttttgggcaaattaagtttgagatgcctgttagacgtccaagtgaagaggtcaagttagctgtacatactttggatgatcagagtggtatcagaatcagaaatatgaatttgaagtttgtagcatgtaagtattttcacagccatgatactagaagagatcacttagggcaataacattaaaagaaaagaggagagggctactaagtgggtataaacatggtaaagatcatctcacaaaatgggaaaagtatgaactggaccaaggttccaattctttcctgccgtctgccagccacatagccttggttgggaccttttacctctttggtcctcagttccctgattttagaaaatgttgaaaaatctattacttttagcctctgatttgaacagtggttgattttcaaatcatgtttcttatcaagtcatgagacacttctacttggaggcataaagttccttgatttccatgtgttctcacttgaaatcatcttccagctttgtgtatcaaggaacagaaatttgggggatccaaagtttgcaaaatttttccagatctagatgcagtttagaggctcctggcttcctggcaacttgcccacctgtgctgataatgctgggcaagtcgtgatgcttgttatgtataatcatctgagttgatgttatggagagcagccatatctctacagcagaggaagagctatctgcagttggaagagtttagagcaatctttcagggccctgtgcctgagtgtggctggagtgtggccaggagactaataattgagcagttctgccagctttttcaaagggatccagtggacctctgccctcattgcatcatcctaaactggggaaatggatattattatttacactgaatattcttcacctgagtcagtctaggaggattgatatcagatcatcttagactttgtgacagaagactctgcatttacagactgactaagacaagttgctcaccttgtttgagcttagtttcctctttctgtgaaatgcatgtaatacctgctttattgggtagtataaggattaatggaggtcatctttgtgaaaatgtctgagtcagtattagtgttttttttcctcctgtatactcctgaattattcttagcatgctctgccctgaacgcaatggtggtaaagatgagaaccatgaccatccttggtaaggatgtctcagaggatcaaaaggaattctatcacaggtgagaaaaggaagattcacctgtaacactgaggtgctacttcctgtatgccactaactctcctgtgttacaagtatgatgtgttaattttatcattaaagactacctccctgacccgccctgcacagacactgaatgtattgaacttaagcaaactccacttattgtacatttcttctatgttgaaaacaggctatgatgtaaggaagcatgagattaatgagggcagaggggtgaaactgcttccagcttgacttccatccaatgcttgaggcatcttggagattgtcagtgacctacagaactttcctatatatacaataagaggagttaattcaagaccggtgcatgtgagtttactcaaactttaaaatgcttatgattcatcttcagattttgttaaaatgaagattctgatttagtaggtctggagtggggtctgagattcttcatttctaacaagttcccagtgatgttgatacttctgcttcaaggaccacatttgagtagcatggttctagatttattcatggtcttaaatgctatgactttatgatagagaatatagaaagcatacccatctatccatccatccatccatccatccatccatccatccatccatccatccatccgtccatccatcctttcaatgaatatttatctagtgctcaacatgggtcaggccctgtgccagacaatgggattatagaggcaaatgtggcctaatctcgtttagaaaatcatactctagttagggagacagacatgaaaacaaacatttttcagaatcactctgacccagattcctggaacagcaatttctttcttgtccttaaaatccttatctattctctggctaagttcctttaattcacacatactgagggcatcttaaatgatatcatataaggcagaaatctgttggcatatccctaaggaaaagagaactggactcagggcatcacagagttcattttaagtctctgctcttttgtagccatgaaaccttagtcaagattctttgggcctcaatttcactctgtgtaaaatgaaggagaatcatacctagcttgtttagcacatgggatttttatgtagcttaagctgaaataataaatgtgaaaagtgtttgaaaacttcaaagtgatacacatgtgtaaagagatgtttagcttcttgtgtgtacatgcactacagtattgtctgtaatggtgacaaatagtagaaattatgtaaatgtctcaaaaatgagactgtagtaagttttgggccatatgacttgtactagtcaagggactgtgagcaacaatgacatgttgctagttctaggctgtggcatttaagagccaatgtcccccttccatccctccctccgtctggtgcagagaccctgaaggccacacataccagattgtgtaaatacatgcatgatggtagcaacccagacctctaagtaaccatttggaggagaaccacattggagatatcttatttcagttgttgagtaatcctgtcatatactggcttgtttagcacatgggattttcatgtagcgtaaactgaaataaatgtgaaaagtgtttgaaaactttaaagtgatacatgtgtaaagagatgtttagcttctcatgtgtatgtgcagtacagtattgtctaatggtgacaaataatggaaattatgtaaatgtctcaaaaatgagagtacagtaagtcacccaacccatatcacaagttttgtgaggataaaaaagcaaaaccttgtatcatgttaagctgttgaaaccttagagttgcttattatcacagcatagactatcctatcctaaatatataattaattccatcagactttctatgcacttagatacataggcaattgcaaatatatggtattgccatgcgtatttttgccacaaatgcttttttactatatatagtattgtaatgtattatttttgttcaataatgtactggagatatgtgttatttggttcatgtagatctacctaattctttcagcagatacaaaatattccatgttagacatataagccatttctacattggtaaatattctctgcctctctatctttctcaaatagactgaaataagtatatttgtacctgctccttggcacatgtgtgggtgattttttggaatagatactgaaaagtggaattgctgagttataggacatttagatttcaaatgctagaaaatactgccaaattgcccttcaaattaattgtatgaacttatacttcctccagcagtgtgtaagagagtccattttccatacctttatattacttcttgagtaggaatatctgaaaattattgcttatctattgccatgtaacaaaccatcctcaaacaaccattatattatctctcttgagttcatagcgttattagactcagctgggaagttctgctccttgtggtattggcaggggttgcagctatctgggggactcaattgggctggaatcactgagctggcttgttcacatggctgccaatggtgctgctgtctcctccatgtggcttgacagaagagcagctgggttcctggagaggaagcaggagctgccagtactcttaaggcctgacctctgaagtaatcccagatatcattttccccatatggtattgggtcaaagcactcccagggccatcccaggttggaggggagggcaaaaagactcagaaatggttggtgttcatctttggagactatttacacagtgattgtatattaaaaaaaacagcaattatatctttgaatttgagtaaagttaaagaaatggtatctgtgaaacttcgaataaacaagtggagcttaaaatatttgattcttgcatattaggttaatgtgctctatgctaatcaggttggagaaatattaagctctgctaggaattctattggactgaaggtaagtcatcctgccagtaactacctaagtcaaggtgtgaacaagctggaatttcttcccattctaatttttttcaagtatacccgtagaaaacaaaatgaagaatcgggctcagaatcatttccagctacctatcacatctttggaagcttcaaggttagatataatggaaagcatgcaaaaaaaaaaaaaaaaaaaaagaggctgagaagtgtacaaggtctgcagcattcaaactgatgtttcactaattaatatcctgctccacagatgatgcaggaggtgaggcaaatgaaggggctatggtaggagaggagggcagatagttggaggcaagtccacagacaccacaggtatatcagatggaccaggacagctttcctaatctgtggttttgatttgcctacaccattgccatgtggcccatgtaatgatgggaagatatgtgggctaaaggggaaagagggagatatttgtcatgtctacctgctcatggctcctagacaggatcctttctttccgcctattctagacaagatggctatgaaaatgtttatggttttggttgaattattttaaatttgctggggaaaggccattaaacactaaatttagggcttcccaaaatggacactgagaaataaaaaagctttattgaggaataacatctttgaaaaaaaaaaaaggaacgaatgggattgtgtatggaggagagtctagagtgtgttgccaaactggcaaagcatctgccagccaaatgggagaatttggagggaaaattgcccactataggcatcctgcattgggtggaaatgcctagttcttttatgaggtgccttgcttagtcattggttggtggctgcccttaaaatagtgtgcctctgaaagtggaggcagaccatgaggttgctcacagctggaggctgttagacaactacattctttccacctgggcagcgagtgctttcttgaaagatctgactagtgcttctccatgtctgccacatgtaacttatctttctccagttcattttttttcctcaaagctgcactgagaaagcaagctttgcaagatgttctctgttattgatttcatctacagactctccttggttgcaagtgtttgagagcaagttgaacttgcttaggagaaaaggcaaatttattgctcatgtcattaaaccatgggaaggccagaaatgatttgaaaccagaaactcagatgcccccaagatggctgctgcctcttgtctctgcttctcttcgtgtgatgggcttctttgagagtgccagaagtaataactgcactacacttacttctctctgcttctgccaacagaggagaaaaattgccttacctttctgcttggttctagtgtttaaaatctcaagaaacgattctgtgagtctgccagggttgtatgccaatttctagatcaatcattactgccaaggaggcaaggtagaaaactggcaactcctatttaaactacatgatccaaagcagcattcccagaagcaggggaagggtgaaaaggcaatgcaaataaatgcttaccctaatctttctgtttcttcccctagtcctagcttcattttctaactatttccaatgtcagatgtcagtttaaaggtgaatacactcaattttaatcaggctttttgcacagcgttcaggctgtgcgaggctttataactcaaaagaagtgtttctcagccttttaaagttgatattccttttgaaagaaaatgaagaatatcaaaacctcattcttcctaaaccccagaaatttggacatttgtaactcacctgctgctttgagaaccaccactaagaagatttttttcagttttatttttctataagctttgtatcagttagctattgtagcaaaaccactcaaagatagtggctgcaagcaataagcatgaatttttgctcacatgtctatgagttggctgggtgtttcttctggtctcagctggactcgcttatgcagctatgctcagctgtgggttgggtggccacttaggtgatcatggctgggtttgatcacatatttgggtattagctagttgtgggccaatctagggcggcttcatttaaaacaactgagctctgctctatgtggtctcttgtccttcagtaggtaagaccaggtttgttcatatggcagtgacagtttctaagagaatgagaagtgtgcaaatcccttgagacctagacttgaaaccagaagaacatcaaaaccaattaaaatccaaggagtgagaaaataaacatcacctcttggtgggagaagctgcaaagttatattgcaaaacatgtggatacatgaagaattgtggccatttttgaaaatgaatgatcacaggtttttttttttgagagatgaccttaaactttaaaatatggtcttttattaaaatattaagtttttcacactacacctctttccttcccatatttataattgtggcaccttctgccatcctcccttcacacaccatgtacctgtatgttccagttaataaaccactcctttggaaaaggacttagaatttggagagaattcaaggagggattttccatctgaccaaaatggagacacagaggctgggtttacagtgtgtatgaggaggatggtttagataaataaatgaaaggaaaaaaaaaacccaggagatgaagttacctctgtaaaatgagggggtgaggttggatgactcttaaaatactatcaggatggcacatattgaacttgaaatttatagtctttatgatttaccctgccacttttctttttcacagaaattcccccagaataattgaatgggcaggcagccagaggaatggggcataaaagcggttttaaagtataaaacagagtaatttgggatagtagcatggagtcagagcaagaaagaatagtagcatttgctgaattcctcttatatgctaagttttgaactctgaatcttacgttgtattttatttttcccacaacctatgtaccaggcagtatccttcccattttacacaagaagaaatggagactcagtaatattaagaaatgctcccaagtctcacagttagtggaagctttgcttttgtttatccttgaaaatcagtgattggagggtgggaaaccgaatagggacagcagcagaccctgcaggcagctgatggaggaggagatgcaagctctgtgatgactgtgagcctcttacagacctgccctacatctcctttatctttgtatcccaactactcagcacagcgcccaacacatgacaaatattcatgttggagatatgatcatgcattattctgcaaacacactagggctctgtcgatgtgtaattattagaacatgactgaagtgatgtagagtgtctcagtctattagtgctgctataacagaataccatagactaggtaatttataaagatgagaaatttatttctcaccattctggagcctgggaagttcaagatcaatctctggcatctggtgtgggccttcttgctgcatatggggaaggcagaagggcaagtgaaagcaaattcactcccagaatcctttaatagtggcattaattaatttatgaaggtggaacccttatgacctaaatactttcccaaaggccccacctcccaacactgcattggggattaaatttccaacacatgaatgttgggaggcacattcagaccatatcagggagcaaacagatgaaaagaaggcatggctgaggaccacaggaaaatgccagtgaatgccaatgaatgccaaagccggaagttccatgcctatcactgtgggggttgggcattgagtgaggaggaaagctgctggagtccagctttctcagcccaatgggattggacactaacatcctccagaaattgctaaaatcagaattgatgcttctctcaagtactgagagaaggaaacacctggaatctctcagctttgccacacctaggggaaaagtcagcattaactgaaaagaaaatattctaagaatggaataaaatatagggaatagacaatctttaggatgcttctatatgccatgagggtattctgccttattataaaatgacagacactgactataaattcgctacagcaatgggtaatgaaacaagtgttcacaaatacaggactttgagtttaatgcatatgttgctattattgctgttttaatcaaacaaccagtagtaatacaatgggaggctttcttcttaaaatgatggataggataaagatacccaagaaaaatagtctctaagacctaaaggttttggtgatagatgatttaaaatgatttaccagtgtggttctagttattattgttgtataacaaactagccccaaaactcactggcacaatataactacctcatttttttaaattaattacgtcaacttttactcttaattctccacacattataaacatagaatatgacagtttttacttatgagagtatatatttttacttattagctctgcagtgtgcagagtaaaacttgttctttcctttaatcagaatttttatgtgttgttacatatttttttatttttgaaatcttttttttttattatactttaagttttagggtacatgtgcacaatgtgcctgtggggtggggggaggggggaggggtagcatttggtgatatacctaatgttaaatgatgagttactgggttcagcacaccaacatggcacatgtatacatatataactacctcattatattcacagattatgtgggtcaggaatccagacaagaaatagcagagatggctccttgatttctggggcctcacattcaaactctgggggtttctcaatggcttggggactagaatcatctggaggctttttcctctcatatatttaacagttgatcctggctgttggctgacacctcagctgagctctgagcttaaacacctacatatggcctctccattgggcctagtttgggctaggttctaagagcaagtgtaccaacagaacatggtgaatatgaagggaatttgctaatctaggctcaaaattcacatagcatcacttctgctctattgattgaggaagccacagaattctgccaagctttaagtggaagggacgtagaccccaccactcattggagaaatatgtgggttacacatgggatgaaggatggtgtggccgtctttggaaaacgcagcctaaacacagcctatcacaaaggcctattccttttttaatgattcaatgtctggtgtcatcataaccagcaaccttcctggcactagactattaccacattggcatcatcctggacatgagaagaaacctctgacaactcattctaaaagagaatgctgggctggagattgagtagccagaattccagatccagctctgccacaactagctgaacctaagctcctcaattataaggttttaggggtttaagatattaagatcactgctcttactatggaaagaaacttgctccttgggcattaagctagattcccaaaccccacccaaggaggtctttataccaatcatgtcatgctgtacttctaaaagcctctggccctggtgagagcagatctatgtgcctcttgacccacctccccaccccctaccagtgcatcaatttgtactagggaatctggaattgccaatgagaggctaactaggtgtggctcactgttgcagagggagatgtgtggagccgtttcctaccatatgctactgatgctagaaggctgctttgcagaaagacaggagtaaggactttgtgaagacagagttagtggttgtgtgtgtgtgtgtatgtgtgtgtgtgtgtgagagagagagagagagagaaagagagcaagcaatcacatggatgagagaaaatgcaagagcacaaaagtgaggaagctgaagtgagtgacattgctcatgattttgtggtctctggtttcagcctcttatgatacctgctgtgcttcatccactttagttctaagacatccctgcagtttccagaaaatttcccatttacttgagaagtacaaatggaattctatccttttcaacaaatcatccctgaccaagatgcatattccaacctcacatacagtgaacttgacattataacccagataaaactcatccaactcagaaaaattctcctcccaatccttaccagtcacagcctggtgcccacattgtaaaatccttgatgagtctcagcctgcaatttattattctttgaggatatagaaaacagaagaagacaagttgtaaatatttggtcctttaagaaaccttacagtttaaagaccaagccccttttattgcgagaaaggaaccgagtctcttgtagagaggggaagtgacttgcccaaggttgtctactagttaacagtggagctcagatgaaaatcaggtctgattgtcatttcagcccctgcctgacttcaaatcagccacagctaccagggagaaagcagctgattgagcaatcaaatatgtgttttacatttacattgcttttctctgcactctgtttgttctcatgggagttagaatctacagcgagatgttaactgccagcagcgatgaacagatttggttattgccctgatgcaacgagcagtgagagtgggggagaatagaagaatttcattttaggggtcaaattaaatttgtgcaagcccagcatgcttctgaaaactctagcaacatagcctaggttataacatgcacaaacattgaaatcacttgtggaccttcccagtgagggaaaggaattgatataatgtcattttgaggccacttctacttccatgattctgattatattgcaccaaaaagacaaaaatgtttcttttcaaccttttattctggaatattttaaacacatataaaaatggacaaaatagtgtaatggatctccagatgatgatttttaaaaaagctttattgatgtataatcaatatacaataacttgcacatatttaaagtgtacaattagaaaagttttgacacacacacaatcgtgaaaccatcaacagtcaagataatgaacatatttgttaccctccccctcacgttttttcatacccctttgtaatctctttctctggcaactccccatggtctctcctcttctatatcccccttctccctgtctgcaggcaactgctatctgctttctgtcactgtaaattagcttacattttaaagaggtttatataaatggaatcatacagtgtgtactctttttaacgtctgatttatttcaccaagcgtaattattttgagattcatccatgttgtttcatgtgtctggctcatttcttttttattgatgagtagtattccattgtatgaatatggcaaagtgtgtttgtacatttatctactggtgaacatttgcattgtttccagcttttggctattaaaaataaagttgctatgaatatttcagcacaagtctttgtggggatgtatgctttcttttctcttgtgtaaatactggagtggaataactgaatcatatattaagtgtacatttaactttttaagaaactgccgaactgtcttccaaagtgatgatactggccgggcgcagtggtttatgcctgtaattccagcattttgggaggccaacttgggtggatcacctgaagtcagcagttcgagaccagcctggccaacatggtgaaaccccgtctctactaaaaatacaaaaatcagcccggcgtggtggcaggcgcctgtaatcccagctacttgggaggctgagacaggagaatcacttgaacccaggaggtggaggttgcagtgagccgagattgtgccaccgcactccagcctggacaacatagtgactccatctcaaaacaaaacaaaatctgaaagtgatgataccattttacagtcccattagcaatgaatgagttcctcgatatcctcaccaacatttggtatcatcagcttttaaaattttagccattctaatacatacatgctgttatttcattgtgatacttattttcggttttataatgatgaattatgctggacatctttctatgtgcttatttgacatccatgtatcttctttgatgaattgtctgttcaaatcttttgcccattaatttttttttactatttacttttaattgttatatatttgggttcaagttctttatcagatacatactttgcaaatatgtctaccagtctatggcttgtattttattctcttaattgtgtcctttgaagaggaagcattttaattttaataacgtttaatttatcaccttttttcttttatgaatcatacttttagtatcatatctaagatatctttgcctaattcaaaatcatgaagattttctgctctgtcttattttataatttgtatcatgttatattttccatttaggttcaggattcattttaattaattcttatgtatagtaaaaagtatggattaaaatttattttcctagcatatccaataattccagtaccatttgttggcaagactattctttctcctgtgaattgtctttacactttaaaaaatgatcctggaagtttcaaggaggagattacatttgatctttactttaaagaataacttggattataacatttgagtgaaaggaaagtcagtggccagaagattagatagtgcaggactcacaggacaacactgttcagactcatctcctttcacatcccctgactccaaatgccctgatgtaagatccaactaagccaaatggtatcttgtgttctgtaggaaacatgctctctctaagccagaagacttaataggtcctgttccttctacctggaatctcttcgttacttctctcaactatactttcctcagctagtctgaacagtctcttgggacttagcttttgagaagcattcatcaaacccaactctatgtacccataagacacgttgctaaccaggtatggttacataactttcaggagctagtgtgaaataaaatagcagacccttgttcaaaaagtaggaaaaaagtctattaaagatactacaatacaaagctttatcttttcttccatgatctctctcttgacttgtgtatttatttgctatttgctatttattttctatttaatgtcatcccaagtaaagaaaaaatataattttgaatggttagcataaattttaccattcacctctatattgtgaaatgacagtttaattaagagcattgatctcacatgtagaatcagtgaaattatagaattcttgtttcatagcttgtacatgcaatattttgttcttcccagtgaaaaatatacacaaaactaacttaacatttctaaatttcatttcttgataaatatttcaccaatactttttttgaacttttttttttgttatactttaagttctgggatacatgtgcagaacgtgcaggtttgttacataagtatacacgtgctatggtagtttgctgcacccatcagcccgtcatttacattagatatttctcctaatgctatctctctcctagccactgcccccaacaggctctggtgtgtgatgttcccctccctgtgtccatgtgttcttattgttcaaatcccacttatgagtgagaacatgcggtgtttggttttctgttcctgtgttagtttgatgagaatgatggtttctagcttcatccatgtccctgcaaaggacatgaactcatccattttttatggctgtatagtattccatggtgtatatgtgccacattttctttatccagtctatcactgatgggcatttgggttggttccaagtctttgctatttccaccagtactttctaccttcagcttactgatgaataaggaaggaatgaaacaaaaaggaactatgagttgccctctattttcctttctttctgtgtcatcatttttagcataagtggttggctaatatggggaagtgatacaaacttttaaaaaagaatataatagtgtttcttggtcatacatgtttgctagaatatcattgcattccttctgtgtttgaaacaagttctggtttgagccttaagtgtggcctcttgggctgtcagctgtccctctcccctctaaagcacatgtagaagtaactctcttttcttgtactcactttgagtctcattgagctctcacgcactgtggtccaatggaattatttggtcactttgagcctcattgagctctcatgcactgtgggtctagtggaactatttggtcactttgagcctcattgagctctcgtgcactgtgggtccactggaattatttggttacagggcattgcaaatgctaactgcaaattgtttggcaagaaacagtgaacatgcatgtcacatgtatctcctctgatcaaacacatgctcttttataaaatgcaagtttgaagataaaattactaagattttcaagacaataactgcagagcatataaccagggtccttctgagtgtggggccctttttgactgcacaggtggcatacctctgacaccagccctggtgctaactcagatcatttatcactgtatcataaatgtcagatgtcaccgttgagttgtttggaagttgcattaaagttgcattagtcaagattctccagttaaacaacaaataggacacacacacacacacacacacacacacacacacacacagagagagagagagagagagagagagacagacagacagacagacagacagagagcaggggttggggggcggtggtagatttttttccccaaggaatgggcttatgtgattatgggtgccggggcttgcaagtccaaaatctacagggcaggccaacaggctggagacccagggaagttttgatttttcagtcttgaagctgaaggcaatctagaggtagaattctttcttccttgggaaacctcagtctttttttgtaaagccttcaactggttggatgaacccctcatattatggaggataatctgctttattcaaattctaccaatttaaatgttaatcacattttaaaaataccttcacagcaacatttagactggtgcttgacccaaaactgggtaccataacctagccaaattgacacataaaattaagtgtcatagaagtaggctctgagatagataccagtgtgtaggaagtttattaaggagttctccagggccaacatttgtggaagggaaaggaagagaagggagcagtattgggcagaggggaaagctgagctgagatacagtcccaatgtcagccagacctatgaggaattctgcagagaaatgacagttcacatttgtcccagttgagggcaaaggactgggcctttttatgcccatgtcaatcagttattggatatgaattcctcatatccagaaagggggtgtggccttgggcaaggtgactctcttcagcccaggcattccctctaagaggctaatagcacttccagcatgtgggggaatgagacctttcacaccagagggagaccagagtgccacatcacagcatctgccactcttagcctccctttccagttatacttcccagccctacatgagggtcaggatcttattatgtttcctctgcacttcttacacacagccccttgtctggcacatagtaggcactcaacaaacctttgttgaattaatcaacaaagatactgagcaaaaactaattttctctcacaaaaagcagatcctgataaagaacagaaaggccatgaatccttatggagcttttcacaattcatgcagctcttccacatttgtcccatttaaacttcacaacaatctcctgaagtagggaatgactgttctcatctttctagatgaagaaactgatgctcagagaaataaactggttctcctggagtcacagagttaatgaatgggtttttcaggatttcctttgctacagcttagagtgattccattatgttgactaaatatgtcctgtccttcttacctaaaacatggccctcatggttatgctctaaggttaaagtgaactacaaatactctacctttgtttctctgcccaaaggatgctgctgacttgttcttccagaaccagtgtgaattaagggagatccacctacattttgggggctcacattgtggctgctggtgtcaatggtgggttgagtggctctaaaacatgttgaagctactttagtgacatccccagggatagagctactcccttgtccttgttatataacaaagttccaactacccaagccaactggccaccaataacacagggtcaaccttgaggctgttaagaggagggagatttatgggagctcctcttaaatgttgcttcttttacttccatggtgttgacctttaaaaaaatcccacagactatcagatgaaagtaaaaatagcctttcttggcattgaataatctgactttccttgacgaagaggtcatagatttccctcttcagatggtttcttctttttgattaactagccaaatctattgaggaaagaggattcaactctttggaggaagaaaaatggaaatgcttaggtaaaggacatctttttttaaagctgcgttgttaggtgacttccatttgatcttatagaacccataaagtatagatctgtgggttggaatgatagccatagaactaaactctattttttgaaagcaaataagatgtacctaatatgtcttctgcttcttggatgtcctaataacaaagaaattaaaaccaaaagtcaatatcccatgattctgtgctctgaaagttatctgtgatgtaacgggaaacagactcagatacaaatgcattttagtccacctctgtatttactagttctatgactctaaactttaattactcaactgtaaaagaggaataaaaataaatgccttgcttggctattgcttaggtcacataaaatgaaagagaaagttctctctaaacagtacagcgatttttactaaagtactttattagtcataagattaggaaggatgaaagatttttgaaagcctgtgctaattggaagtgttgggtaccaggtctcataattaattgtcatgccatatttaatctaatcatgagtaacatgatagcctatgggattattataccaacaatttggattctagaaagccctgtgatagttgagtaacaaatttgtgctttttcaaatggtaaatcattacctattggtggacccaaaactacttgacccattctaatgtgtacagttcatgagttttgacaaatgtggagacccatgtaactaagagaatatttccatcactgtaaaaagttcccttgagcccctttataggcagtcctctcctccagatcccaggcactatggatatctatttaggtcattaagaatagtttctcttacatgtaaaattatataaatgggatcatacagtatatactatttgcatcttctttcactcattataatgtctgtgaggttcatccatgtgtgtgaatcaatagttcctttctgttgctgagtagtatatttttgttagagtacacacaatttgtttatctagacacctgttaagggtaggcgatggtcgtttccatctttgggggggattatgagtaacattgcaatgaacatttatgtgcaagactttatgagaacatatgtttatatttcttggataaattctatgaatggctgggtcttatggttagtgtaaatttaatttaataaaaagctgccaaactgttttccaaaattttactttctcatctgcaatgtacatgagttccaattgctccacattgtctccaaaacttagaattgtcagttttaaattttagccactctagtatggattagtggtatctcattttatttgcatttctctgataaatatattttaatgtgttaattgaccatttgtatatcttctgttgtgaagtgtctgttcagatattttgcccatttttcaattggtttggttgtcactgatagcttttaaaaatgaaactaaataaaacagaataggaaatatcagaatacattgcatctggtatattttgtttcattgaacttctgtttcagtattatacatataactacatgcatctgtgtatacatatatacacacatatacatatatactattttgtaatcttaaatacattattataacttaatatcagatttattatttagtgataaaaatatcccgctccatatcttaagcccatggaaagtcagattttcttatacttgaagctgaaagcatatctgttctggcttatgcttctataatttctccctgggacaacctctttacattccactccttatattttatgcagatttagagttgtacatttgaataaatatacagcggattgttcatcttgcttggttgattgctaagtgtgtgattgctgaaaagtggaaatcatttctagccactgacatttggattcataaacttagatggaaaagtggtagaaaaaagaaggatatgcaagatataaaagacctttagagaaggaatatcaattaattttcaaattgataatagtagttgtagtttttcagaaagtttcagaatttattagctatgccatgtttggttttagaactttgtattgtcaggggattttctcttttgactagtgacaatgttaaaatgtttgcaatataaattctccgcatgctattttgaaaagaagaaagaacttttctgttcattttcattatattctacacattaaaaacttaaagctaaaactaccctttttatggtttgagctgtccaggagtttgttccacagctcctcaatatggctgaaagatgttttgctttttggcattaagcagctggctaagggaaacatgtcctccatccagagagagctgtttcctgagatcttgcttttatttgttaggataatacaagctccactaataaataaacctccacattttagggtttaatacaaatagaagtttatttctatcttatgtaaccatccaatgtggctattcctgatggggtggtgagtgcatgaatgggtgtctgctccatgcagtatgtgcagtcactgaaggaccaggctgatcgaggagctgccatcttcagtatgttcttcccatcatttcccctgatcactggcatctaaccagagaaaagaccagggaaaggaagatcatgcttggcagtatctcacaggctgggcgtggatttgtgcacatcacttccactcccattcctttggccagaactcagccatttggccacacctactgcagaggaggctggtccactgtatttggctgtttgctcaagaagaagaggaaaacttggattttgaggcagagcttgcagtctttgtcacttcacactgtccctttcaatttctgtaatttcttgtggagatagtgaaacacagagacaaaatgaagatgagaaaaagaatgtttgcatacagcaagtgggtggatccacaggggaacccagatatctcaacctgtcctattttacagaccacatgaacagcctcccccttccagtctcatctctcacatcatactccagctgcactggacttctaattcctctagaactccaggctcagggaatttgcatgggctctgattcctgccagaacactcttcctcctatttgctaaacgatatcctaagcatgttttgtgtctcaacttcaggacttactcctcgaacagattttccctgaacttgaagcctaaatttggcccttttattcagcagtctcagagactcctcttcttttctccttcacagcagtggttctcaacatgaagtggagagggggaattttgaccccaaaggacatatggcaatgtctgaagatatttctagtggtcacaacttgacagagggcgggtactactggcatgtagcaggtagagagatgctgctaaacaccctacaatgcacagactggcccctcacatcaaaggattacctgacccataatgtcaattgtgctgaggctgagaaaccctgttgtaacatttatcacaacttgtaaatatgatttatttgtatgtttgtttaatgtctatctctctcactagactaaaagggatggtaactactcattcactgttcttctcactatactacattgcatgacactgccttccctgtatgcagtctgctcatcactctgttggggtttgcaggtttctgagaaggggcaatatgagtggagggtagtgggttttacaaatttgtctccagcctcaccccccagaccacccacatcatacctcctccttctctttcaataatcaatactcaatgctctaagtcttctctctccatcaataattgttcctctagcagatttgaaactgatgcaccttgaatgtaaatgatagatgatactcccagaggcccattgtaagaatgagataatgaaatgttaccttttctagatattttgtagattgtggaattttcatctattttattttattttattttattttattttatttttgagatggagtcttgctctgtctcccaggctggagtgcagtggcacaatctcggctcactacaacatctgcctcccaggttcaagcaattctcctgcctcagcctcccgagtagttgggactataggcatcgccaccacacacctggctaatttttgtgtttttagtagagacaggctttcaccatattggccaggctggtctcaaactcctgacctcgtgatccacccgcctcagcctccccaaatgctgggattacaggcatgagccactgtacctggccctatttatttatttatttatttttgagacagagtcttgctctgtcgcccaggctggagtgcagtggcacgatctcagctcactgcagcctccacctcctgggttcaagcaattctcttgtctcagcctcccgagtagctgggactacaggtgtgtgccgccacacccagctaactttttttttagtatctttagtagagatggggtttcaccatgttggccaggatagtcttgatctcctgacctcgtggttcgcctgcctcagcctcccaaagtgcccgtttatttttaaaagtcttttattttaactaggaaagtaacatatgcacagtaaggaagaaataagtagaacaatagaaaaaaatgtaaaaagtcactcatagtcccaccatctgaagaaaaacactgtccatatttcaaaacacttttcaaccagaattttctctatgtgtaatattgtgtggggtgtgtaggtgtgtgttcattgtttttttttttttgttttgttttttttttttttttagaaagcaaggggacaaatagttgtttttatttacttgctgaacttaaaatagattacataaatttccacattgtactagtttgaattaaaaccacaaaactaagaacatttgctggaatagaatctgtttttgaacctaagttactacttaaatagcatcatatactttaacaaaaagtataggtacatgattttttggcctaaaaatattaccaaacatggaatcattggatctcagaccttctagcatcctttaccaaagtttatttgtcttattatcttgaaataggtctttataaaaatatagactataactagaaacaaatatctttttaagacttcatatagtttcaaactagaaatctaattgagagacttaataaattacaaactttagtcaaaatatattttcagtaatgacattcctaagttaggctttctgatgtcacacagttctagtacaagtaatataggtcatttctcaacctctaaatagataaaaatcatcaatatcatatcttgttattcttttactcatttgtttgacatagtgaaagtactatgtgagaggaaattctattaatgaggagtctttaaaataaatgttattaattttttaatcatgtgaatagaagaggaaatgaaagtacttttaaactggctcattctttctaatctcttttctacattttaatattccttattaacttaatttctgtttatttgtttgaacttttttttttattatactttaagttttagggtacatgtgcacaatgtgcaggttagttacatacgtatacatgtgccatgctggtgtgctgcacccactaactcgtcatctagcattaggtatatctcctaatgctatccctcccccttccccctaccccacaacagtccccagagtgtgatgttccccttcctgtgtccatgtgatctcattgttcaattcccacctatgagtgagaatatgcggtgtttggttttttgttcttgcgatagtttactgagaatgatgatttccaatttcatccatgtccctacaaaggacatgaactcatcattttttatggctgcataatattccatggtgtatatgtgccacattttcttaatccagtctatcattgttggacatttgggttggttccaagtctttgctgttgtgaatagtgccacaataaacatacgtgtgcatgtgtctttatagcagcatgatttatagtcctttgggtatatacccagtaatgggatggctgggtcaaatgggatttctagttctagatccctgaggaattgccacactgacttccacaatggttgaactagtttacagtcccaccaacagtgtaaaagtgttctcatttctccacatcctctccagcacctgttgtttcctgactttttaatgattgccattctaactggtgtgagatggtatctcattgtggttttgatttgcatttctctgatggccagtgatgatgagcattttctcatgtgttttttgactgcataaatgtcttcttttgagaagtgtctgttcatatcctttgcccactttttgatggggttgtttgttttcttcttgtaaatttgtttgagttcattgtggaatctggatgttagccctttgccagatgagtaggttgggaaaattttctcccattctgtaggttgcctgttcactctgatggtagtttcttttgctgtgcagaagctctttagtttaattagatcccatttgtcaattttgtcttttgttgccattgcttttggtgttttagacatgaagtccttgcccatgcctatgtcctgaatggtaatgcctaggttttcttctagggtttttatggttttaggtctaacgtttaagtctttttttttttttttttttttttttttttttttgagacggagtctcgctctgtcgcccaggctggagtgcagtggcgggatctcggctcactgcaagctccgcctcccgggttcacgccattctcctgcctcagcctcccaagtagctgggactacaggcgcccgccactacgcccggctaattttttgtatttttttttttagtagagacggggtttcaccgttttagccgggatggtctcgatctcctgacctcgtgatccgcccgcctcggcctcccaaagtgctgggattacaggcgtgagccaccgtgtccggccacgtttaagtctttaatccatcttgaattgatttttgtataaggtgtaaggaagggatccagtttcagctttctacatatggctagccagttttcccagcaccatttattaaatagggaatcctttccccattgcttgtttttctcaggtttgtcaaagatcagatagttgtagatatgcagtgttatttctgagggctctgttctgttccattggtctatatctgtgttttggtaccagtaccatgctgttttggttactgtagccttgtagtatagtttgaagtcaggtagcatgatgcctccagctttgttcttttggcttaggattgacttggcgatgcgggctcttttttggttccatatgaactttaaagtagtttcttccaattctgtgaagaaagtcattggtagcttgatggggatggcattgaatccataaattacctcgggcagtgtggccattttcatgatattgattcttcctacccatgagcatggagtgttcttccatttgtttgtgtcctcttttatttcattgagcagtggtttgtagttctccttgaagaggcccttcacatcccttgtaagttagattcctaggtattttattctctttgaagcagttgtgaatgggagttcactcatgatttggcactctgtctgttattggtgtataagaatgcttgtgatttttgcacattgattttgtatcctgagactttgctgaagttgcttatcagcttaaggagattttgggctgagacgatggggttttctagatatacaatcatgtcatctgcaaacaggaacaatttgagttcctcttttcctaattgaataccctttatttccttctcctgcccgattgccctggccagaacgtccaacactatgttgaataggagtggtgagagagggcatccctgtcttgtgccagttttcaaagggaatgcttccagtttttgcccattcagtatgatgttggctgtgggtttgtcatagatagctcttattattttgaaatatgtcccatcaatacctaatttattgagagtttttagcatgaagggttgttgaattttgtcaaaggccttttctgcatctattgagataatcatgtggtttttgtgtttggctctgtttatatgctggattacatttattgatttgcgtatattgaaccagccttgcatcccagggatgaagcccacttgatcatggtggatgagctttttgatgtactgctggatttggtttgccagtattttattgaggatttttgcatcaatgttcatcaaggatattggtctaaaattctcttttttggttgtgtctctgcctggctttggtttcagaatgatgctggcctcataaaatgagttagggaggattccctctttttctgttgattggactagtttcagaaggaatggtaccggttcctccttgtacctctggtagaattcggctgtgaatccatctggtcctggactctttttggttggtaagctattgattattgccacaatttcagatcctgttattggtctattcagagattcaacttcttcctggtttagtcttgggagggtgtatgtgtcaaggaatttatccatttcttctagattttctagcttatttgcgtagaggtgtttgtagtattctctgatggtagtttgtatttcggtgggatcggtggtgatatcacctttatcattttttattgcgtctatttgattcttcactcttcttttctttattagtcttgctagcggtctatcaattttgttgatcctttcaaaaaaccagctcctggattcattaattttttgaagggttttttgtgtctctatttccttcagttctgctctgattttagttgtttcttgccttctggtagcttttgaatgtgtttgctcttgcttttctagttcttttaattgtgatgttagggtgtcaattttggatctttcctgctttctcttgtgggcatttagtgctataaatttccctctacacactgctttgaatgcgtcccagagattctggtatgttgtgtctttgttctcgttggtttcaaggaacatctttatttctgccttcatttcgttatgtacccaatagtcactcaggagcaggttgttcagtttccatgtagttgagcggttttgagtgagattcttaatcctgagttctagtttgattgcactgtggtctgagagatagtttgttatagtttctgttcttttacatctgctgaggggagctttactttcaagtatgtggtcaattttggaataggtgtggtgtggtgctgaaaaaaatgtatattctgttgatttggggtggagagttctgtagatgtctattaggtccgcttggtgcagagctgagttcaattcctgggtatccttgttgactttctgtctcgttgatctgtctaatgttgacagtggggtgttaaagtctcccattattaatgtgtgggagtctaagtctctttgtaagtcactcaggacttgctttatgaatctgggtgctcctgtattgggtgcatatatatttaggatagttagctcttcttgttgaattgatccctttaccattatgtaatggccttcttggtctcttttgatctttgttggtttaaagtctgttttatcagagactaggattgcaacccctgcctttttttgttttccatttgcttggtagatcttcctccatccttttattttgagcctatgtgtgtctctgcacgtgagatggatttcctgaatacagcacactgatgggtcttgactctttatccaatttgccagtctgtgtcttttaattggaacatttagtccatttacatttaaagttaatagtgttatgtgtgaatttgatcctgtcattatgatgttagctggttattttgctcgttagttgatgtagtttcttcctagtctcgatggtctttacattttggcatgattttgcagcggctggtaccggttgttcctttccatgtttagcacttccttcaggagctcttttagggcaggcctggtggtgacaaaatctctcagcatttgcttgtctgtaaagtattttatttctccttcacttatgaagcttagtttggctggatatgagattcttggttgaaaattcttttctttaagaatgttgaatattggcccccactctcttctggcttgtagggtttctgccgagagatccgctgttagtctgatgggcttccttttgagggtaacccgacctttctctctggctgcccttaacattttttccttcatttcaactttggtgaatctgacaattatgtgtcttggagttgctcttctcgaggagtatctttgtggagttctctgtatttcctgaatccgaacgttggcctgccttgctagattggggaaattctcctggataatatcctgcagagtgttttccaacttggttccattctccccatcactttcaggtacaccaatcagacgtagatttggtcttttcacatagtcccatatttcttggaggctttgctcatttctttttattcttttttctctaaactttccttctcgcttcatttcattcatttcatcttccatcgctgataccctttcttccagttgatcgcatcggctcctgaggcttctgcattcttcacgtagttctcgagccttggttttcagctccatcagctcctttaagcacttctatgtattggttattctagttatacattcttctaattttttttcaaagttttcaacttctttgcctttggtttgaatgtcctcccgtagctcagagtaatttgatcgtctgaagccttcttctctcagctcgtcaaagtcattctccgtccagctttgttcccttgctggtgaggagctgcgttcctttggaggaggagaggcactctgatttttagagtttccagtttttctgttctgttttttccccatctttgtggttttatctacttttggtctttgatgatggtgatgtacagatgggtttatggtgtggatgtcctttctgtttgttagtgttccttctaacagacaggaccctcagctgcaagtctgttggagtaccctgcagtgtgaggtgtcagtgtgcccctgctggagggtgcctcccagttaggctgcttgggggtcaggggtcagggacccacttgaggaggcagtctgcccgttctcagatctccaggtgcatactgggagaaccactgctctcttcaaagctgtcagacatggacatttaagtctgcagaggttactgctgtctttttgtttgtctgtacccttcccccagaggtggagcctacagaggcaggcaggcctccttgagctgtggtgggctccacccagttcgagcttccctgctgctttgtttacctaaacaagcctgggcaatggtgggcgcccctcccccagcctcgctgccgccttgcagtttgatctcagactgctgtgctagcaatcagcgagactcggtgggcgtaggaccctccgagccaggtgcgggatataatctcgtggtgcacctttaagcccatcggaaaagcgcagtattcgggtgggagtgacccgattttccaggtgccgtccgtcacccctttctttgattaggaaagggaactccctgaccccttgcgcttcccgagggaggcaatgtctcaccctgctttggcctgcgcacggtgcgcgcacccactgacctgcgcccactgtctggcactccctagtgagatgaacccagtacctcagatggaaatgcagaaatcacccatcttctgcgtcgctcaggctgggagctgtacctgttcattgttttgatcagactcactatgtaggtttttcctgctctttttattaactatcagcatatgatctgcaaacacgatttttaatattgctttatagttataccataatttatttcatattttaattttggggcagttatattggtttcattttttgatattatgaacaatactgcaataagcatctttgtacagaaatctttttgcatgtttctggtttgtcagactaaattcttacagtgggggtgataaattgaaggttttaagaatattaacatatattattaaatgaggacagttatgttttgagagtggaatccttaggctaaaggaatgaaagtccttcagtggaattgcgggcattggaccactgtcagtgacggggaagagggagagaaaacagtgatgtgaaacatcagtctccctggaaagcacactggctttcagaaggtctcaggagtagagttaccagaccaggagggcaagggggttgcagacctagaaggttaaagagaagaaaccaaagattcatcctgaagggagaaactttgcctacatttaatccacacagagagagggtagctttgagctgcttgcatagcttgaggctgcagtcatgatcccagtccctcctgaggctgctgagaggaggagagtgactagtccttgttagcatttacccaaaatgagtcatggagagagaaatacacattagcaggttgagtctaagctacaattggctccagggacaaagcttcccattctcagctgcttctcattccagacatcttaattctcccttgttccctgggtgaggcattaactacacagtccggggttgctgatgaactctgtgtgccaccagaaaagaagcaggctagttgattctatcttttctgggtggcagttctctctctcatgacctattaagaatcctggaggtgcttttgaaagcctgctgtggcctgggaccagcttttgtctcttaaatgaaagacgcaaacggaatggtatcactttcagaaggccactggcaagggggaaagctgggaggacttggtgcttctcaggaagcctggggtcacaggccaggcaggttattgaccagagaggtagagggatgtattctgccaagattgtgtggggtgagtcgctgctgtagaatactaatagcttcttaagcagggatacaaatccctcagtggaaggggtgttattgttgcaatgagaaaattcattatcaaatgttatacttcaagtaagagaaggaaagaagaaaatgaatatttattgagcttttattaaatactaggaccctgcttggcattgaacttgcaccttctcatgtagcctgcaacctgctctatgaggtaggtttgtaaataatataaaagctcatttataaatgtgaggaaattgagtttcagagaggctatgctgcttgctgaggtcacagaggttggggtaggaaccaggaaacagaagtgtggctgatgcctctataaataaataatgtatatagaaatgcataaaaaatgcagggccctaagattttgaaaaataaataatatataaatttaaaagttcaacatttaggtgcactttattgaggtataatttacataatgtcaaaatttattcattgtaagagtacaataagtagttttagtaaattgatagaaaatgtaccaataccaccacaactcagtttttgaatatttttatcaagtatactttcttttatgaaataaggctgtgtctgaaatggtggatagagaaaataatataattgctgacattatcttttctagattctagaggaaggaagaggctgtgggtgcagggaacaggtacccactatagcttcttagagcaaagcaaagtgagatttccagaagggtgattctaaaaatcagtgatggcccatatggcatcacttaaggggctatgaaataaactgtgtggaggtctcctggcattggttaagtagatgtgcagcattaacactttcaagttattggcctgctgttataaaattccacttatatttatgtcaaacttagacattccaggatattgaaacatttagatgtagaaagttgagatcatgactcagtgtttattgttctttccttgcctacctcttgcatgcctttctggtttcggctgagacatcatttcctcttggcagctatctctgaccttattttcccctcttcccaagtatattcccaatataatactgtaattattgctgtcatattatttaaaactctgtagtatattgcccttttacctcaattcttcccaattagattctaaactaactgaaggcacaggaaatcctccctcccccttcagtagtgcagaattcactttgatttcatttcacttctagtttacctagagaattggaaaggcataataatcacatattatatcacattgaaattttgctagaagggggctagagaagattgattgcaaagtgttagaacccactgctgtctaaaggctaaaaatatatcagaaaagagtataaaatatttctgaatatttgatatagttacatgagacaaggctaaggtggtgttggtggggttttggggatgggagtagtttaagaaggaagtttccagttataaaaataatacttcataaagtcacatatgtagtataggatcccctaaacttctggattatttagaaattatttatcttccccaccctttgaatcccagaaattttgaaactttcctagatatttaacattcgacaatagttttaagcactgaccctgaattttcatttgatttaattttgtttaactccagacctcatttttttgatatttaaaaatgtataatatgttgcctgaaaaaatgactttctcatatgacatttgcaaatgttctatccatagcaattagattttcttttggccgccatttaactgtatgtttcaactaaatgaatgtctggagttttattttaaatatgaaatttgatgctagtaattatttaacctctgaagttcttgttgtaatatatttcttaatcttcttgtactctctatactctttgtgatagactcttcagctgatgtgtatttaaataacagtttgcacacctcaacaaaattcctctattgttgttttgtctcttgttctataaaatatttcttgcgtcttgaaattattattattttttagtgctctctggcagcaaatgtaactgcttctgatttctttatttacttccttgtttgtttattaagacaaagaggagtctacagtctggatgctgatctaggaagcgaattatctccaattatgtttctgaggacctgtgtctcttcctgacttgatatttcctagaatttcttaatctattctagggataatttggaagccacaacagagacactgctaaacagttttcaactttggtggcaaagatagagcaatgggttggcactgatggccaaggagaaatgctgtgctttccttcacaggacaagccagggtttctctttctcctttctgtttatcgcaaagccatactaaattttatactaaattgggttacaaattcagatgtaaccataacagtactttgtactgggtcccactgggcacctggtgtgcctttgagccctttagcagtgacagatgaaaagggctaaatgacacactatcaatgcttcctgtaaccctaaagatttcattcaaccgacaatgacaacatcttgactgcaagagctgaccataattattcatctcaatggtttctctctccttattatacttcttccccccatcccatacaatgtacactttatttatttgggtctcatgggcatagagttgcaattgacattcttctcagttcatggaacactatcattacagttccctcttttgttttatttttatttcctctttcatgccttatcctcattccctcccggtatccacagccctctatctccccatgcaccctaactaatatgtcagatatatatccttgagtatgtatggattcttggaaaatatagcatgtgtgtgcattttttaagttggcacatatggtgttgcattacagcctttattctgattttgatttttattactcaacactaactttttgagacttagccatgtttttctattcacaactagttcattgcttctaattccagcagggtttttcacagtttgaatctacattttatttttccatttccttagtgatggataagtcaggctgcctccacttccctgcttccacaaacagaaatttgatgaatagccttgagtccttttggacctggacaaggatttctttagggaatacatacaggagtaggagtgctgggatttcaaggacacacactcttatcttcactatctacaaccagatttattttattttagattgatttctaaaatggctgcacaggctcacagtttcagtagcggtgcaggaagctttccatttctgcacaaccttaccaatacttggtattatttgaccttctaacttctactaatgtgatgggtattaagtggcatcttatcatttttacttgcatttctctgattattggtaatgttagctttttaaatttcttttttgtgaattatcttaattttttgtttaagttttgtttttaatagtttcctttttcatcaaaccatgtcttattgcaaaatatatattaataagtaataactagctttcctattttagtgtgcacccatgcctctatctttctgcatgctgaccatggcttcctatcagcacttataatcaatgagttagtataattctagctaaaatgagcttgatatatctgttggtctatatggccattttcaagaaaacatagcatttccattggcgttttaaagtggggatagaacattaatggcacacctctaagaactcctaggaatgtgctctcctaaaggaaattaaaatacaactcttctaaaacctagaatattttttcatggatttaggaatctttagggctgattatttgactgatatatgaagtggtactgcttcacaaaggaagggctttataaacccacactgagtgctgcaaagtaggcaatgctgttagaataagatatttttgtttctctcaaaaattcattcatttaagaatatttatttagaagaattagatatagattatgcctttagatacagtctagttatcacacaatgttcccgcctttggaggttgcatctttcttccagtgatactatactttttcaaaacattgtgggactctgactactttatagttataaaaaaaaatctaagtgactataacgtaggtcaccagtttgggactaagaactctgaactactcttcaagagagctgagttaaaattcagcttgccactcttatctgtgtggcactgtgcaagatacttaacatctcagacaataatcatggctctcttacaggattggtagaaatgagacaagataggtgaaagctcgagcccagtgatgggcacacaatacttgcaaatattgcttatattgaaatcccaattcatttcaaaatcatattgagcttcatagagtagcccttgtctaggttgaaatccagagagacttgccttctgatcagcggtgaatgaaaaaaataaaatccagagagacagaatgcacatgagtataagattttgttggtggtgtttagttatgtcttggtgagactccacaattgccctctgttttccctcacatcatcctgacagtgtcatctgtctgtgtggtaacaacagtgttaattttgggcggttacagcatgacctgagggattccagaaacctacagggagaggactctctgtttctgctggacataagttcattcaacatagcattcctaactatggcacctatgactgacagaaactgcaaagttgaccttggattgtagggacagatttgtaccctgcctttactattcaaataaagcaattgtgggtgtttgaaaaatacctgtcattgatatctttcttatgtcctgtttaagttcttctaaagtcacattcatcttttgggttctaagaatgcagtggaatagatccaggttcaaagttgcattctcattttaactagccacatgaccttgagcaagtcatttaatctctttgagcctccatttcctcatttataaaaggaaaaaaaaggtactgaccttgcagagctgtgtaaggattaaatgagacaatgcaattaaaccccaagtacttcgccaggcacattgtaggtttttagtaaattttacatcctttctgattcacgagaaaaagtgggttgctctgagttgaaagccacatgtgtcagtgtgtgattccaaattgagcatccttctcagattcctatcaggtactctaaactgctttcttattttgacagatgctagactctctatttgcagggcttagtcctgtgaccatgccagtatgcaaatgaagccttctcaagagctgctgaatgtcaggaagacagcacttctgccagactattaatgtgctatctattgccattgctgctcaagctctcaagagtaccttttaagattttaaaaccaaagagcttcaagagtttgccaaggcagagcatacactttctcattgcagcttgagagaaaagactggagataaggaccgacaagaggttcagtgacttattcactggctctggatgcaaatctgtgctggagttctaataccatggggttagagcacaaagttttgaggaaggagaataaataacatcctggggagaaggaagtgttaacaacctcattagaatgatgtgaaaaaagtggcctactctgccagtattgaggggctctttctgctcaatttgcctaggacccatttgccaggctggagcatccacagctagggtatgagtcaagggtggaaaggagaaaaataaagcctatgtcaaggaatgtctggctgagttggacagcaaaggtctttacccaggactgcagaaggcagaagtctgtaaatagaacacaaagcaagaagctagggaactcaggtactttgtggtctatttacaaatttcctttgcatctattatctgatattagcactgttctctagctttgacctgggctttgcccttgagtactctaagacaacaaaccatgcatgaatatcagaagcctgtaataataataacagtgttagtaaggatttttcagagaaatagagttaatagaaaaaaacatatataataaatatatatgaagattcattacagacattggctcacttgattatgcagccaggaagtcccaccatctgctgtctgcaagctggagaaccaggaaagccaatgttgtaattaagtctgagtctcaaacctagaaccgggggggaaaatggtataagtcctggtctgagtctgaaggtctgagaaccacggactgtaatgcctgagggcagtagaagatggatatcctagctcaagaagagagaaaaaattcactgatgcttgtccacattggtgagggaaaatctttactcagtctactgaaaacattcttacagacacagcagaagtaatattttaccagctatcagggcattccttagcccaggcaagttgacacacaaaattaaccatcatgattattattataatggttattatttaaaaactggggcaggctctattgtgtgtaagtaggtcttatagctcgaaggaatcaggcagaattgtgcaacttgcttcagtatatatttctaacttttggtttgtgcattggttagctattgttatgtaacaaataactagaaagatcttagatgtatacaataagcatttatgtagctcatatatctgtgagtcacttggggtatctctgcttcaagctgagagtccaggtggctcaagtctgcttcatttgttttattctgaggttcaggatgaagggacagctgctacctggagaacatgcttttcaaagcaatgacagcggcacaaaagagcaaacaaaaatgtgtgagcctgtgaaggcctaggtttggaactggcatactttccctcctgcccatctgtgtatacttggccagagaaagtcataagatcaatcccaaaggtaaagatttgggaggtgtagtccatcaatgaaggcaggaaaaaaattcttttttcagtctcatagcatagagcctacatacagggagagcaaagagctggggccagtaatcccagccatgaattaataaggagacctaaatttatgaaatttccatgttattaaatatcttcttattcatttttttaattattattatacttcaagttttagggtacatgtgcacaatgtgcaggttagttacatatgtatacatgtaccatgctggtgtgctgcacccattaactcgtcatttagcattaggtatatctcctaatgctatccctcccccttccccccaccccacaacagtccccagagtgtgatgttccccttcctgtgtccatgtgttctcattgttcaattcccatctatgagtgagaacatgtggtgtttggttttttgtccttgtgatagtttactgagaatgatgatttccaatttcatccatgtccctacaaaggacatgaactcatcattttttatggctgcataatattccatggtgtatatgtgccacattttcttaatccagtctatcattgttggacatttgggttggttccaagtctttgctattgtgaatagtgccacaataaacatacgtgtgcatgtgtctttatagcagcatgatttatagtcctttgggtatatacccagtaatgggatggctgggtcaaatggtctttctagttctagatccctgaggaatcgccacactgacttccacaatggttgaactagtttacagtcccaccaacagtgtaaaagtgttcctatttctccacatcctctccagcacctgttgtttcctgactttttaatgattgccattctaactggtgtgagatggtatatcattgtggttttgattcgcatttctctgatgtccagtgatgatgagcattttctcatgtgtcttttggctgcataaatgtcttcttttgagaagtgtctgttcatatcctttgcccactttttgatggtgttgtttgtttttttcttgtaaatttgtttgagttcattgtagattctggatattagccctttgtcagatgagtaggtgcgaaaattttctcccattttgtaggttgcctgttcactctgatggtagtttcttttgctatgcagaagctctttagtttaattagatcccatttgtcaattttgtcttttgttgccattgcttttagtattttagacatgaagtccttgcccatgcctatgtcctgaatggtaaggccaagttttcttctagggtttttatggttttaggtctaacatttaagtctttaatccatcttgaattaatttttgtataaggtgtaaggaagggatccagtttcagctttctacatagggctagctttgtgatttttagtactgtaatgagggttaaggtttccctcgaatgcacatatgccaagcacaatgggatatgaaatatctttgcatgtgtcatttccctgttccaatgaacatttatgaagccaagccaagtagtgaaattgaagtgtgaagttcatggagtttgtctttttaaaatgttttgttttgctcttgaagaacaatatgcaattcaaaaattgcacaaattataagcatatatcttaaagaatttccacaaattgaccacagcagtattaccagcaccaagattggtttacagaatatgacctctatcccacaagttcattctatgccaccttccagtaattatttctcaggagtagccactattctgactcctagccctattgatgccatttagaactttgtataaatggattgaatcatttatcagattctctcttttgaatgtcgaatctctcttttacgtggatttcttcattctctgaagttccccctttctatgactttctaagtgtcataaggagccctccacgttttacatcctccttaagggatttcatatcttattggcaatttgactggtatgcatcagtgtgctagcatttaaaaatcatttttatctctaaataacaatagtaggtgtatcccctggtataggtattatgggcaatggtgtgacagaaagggaggcagttctgtggaacttctatatcttcactgatttttaatctagtcattataccatttttaagagaggtatgtttaaatctgcagctatgattgcttatttgtctatctccctttagttctatcaagttttgcttcatatactttgatttttaaaaaatattttattaacatgtaacatggagagaaccacagagtgattaaccccacactttaaatgtttgtaattagatgcatatacatttgtaatgatcatgttttcctgacatattgacccttttaatatttttaagggtctctgtgtctccagtccattaatgtactttgaggaactgggaagatgctaggagtgtggagcttggtgagcctgtggtgtgttctctcctcaggaccaccctctaaccatggagggagtcttgttatatgaacctttgtataggtcaggatcctgggagaaaatagatgacaaacttgaaaattttagtagcagagtttatttttatttatttatttatgatctgagttctcatcatgtattttgtttggtttgtctcttgtgtttgtaccaatgttttaatgacttccatctgcagactttatttcaattattacatttgattaaaagcttaaatattttggttctttattcattgaataccttgattaaagatattcaatagattttgggaaaaaatgcaaccaaaatttaggtggctctttgcacacatacaagaagagagtttaattaaggaattacttatgcagtgtggacagagttaaggcaggcaacgaaggatgggcaaggcaaaagcaaggggcactcaccttttgctgggagaaggcctgggtaattaatctacttcatatttttcttgctgtatatgtgggtgtgtacatggtgatgctaaaataataattccatgggtttttctgctaattctagacgttgaaaaaccaacaaaatgaggacaaagatagaaaaagtttcttgtttgtatacaagtaatcatcattcatgtatattagaaatcatttaggtaaaattatcaagcagcataacatgataatggttagcattagatgtattattctattaggattagaaactcagctcatttttactcatctttcaaagtttctagaccacattagataacaatgaatagaagttttgaaaaaggtagaatagatgtgtattctattactaccccttttactgagcgagtgagtaacttagagaaaattcccagtaaatgagtgcatgacatttctctgaagatattgctgaagcattttaagatccttggaggagagttttattttctaccagggaagaatcttggagttccaaataatgaaacaaataaaagaggaggaggaggaggaggacactggccacaaaacagggctcaataaatatttataagttaatagatggaataatcctgcaagagtcatgtctgtagtttgctgcttttaaaatgccattagctttttctacttatgtcagaacagtgatatatcaggtaaacatcagtctctctatgtcctctctttagaatttccttctcattcttatttgcctgcaaactgacttcactgatagcttcctggtaaatggctcccatgaactgttacggctcataagtcccattatctctctgaaaagtttcttttgtcacttaggaatatattctgctgaaaataaaagagaggccaagtgagagaagtttaaacaagggatttgcttttctcacttcgtaaaaagcgtagaggcaggcaatccaagactggtgcagctgcccagtgatgcccctgggaacttgggctccatttttccatgctccgtcctcactgggtagctcttcattctcatgattgtcacctcatggtgaaagatggtgactgcatctctaggcctcatgattgcattatgagtagaaagaatggtgaatggtggaggaatgtcttcttttatctaggaagaggcacccacctcagggactttgcctatgtttcattggccatacatgtgccattggaccaccactgtctataagggaggttgggaagttacatatttttagatggctatattgctaccctgaacaaatcaggttagaaggaaaggagtgaagaaggaataatggctactgcatagacaattaacagtgtctatatcagcaactcatctgttatgtaattgtagtgacaggttctctacttttgcccagttttcaaagtctgctgtctatatcagataacaaccaatagaagtttcaaaaacataaaataaatatgtattctagtgctacctctgttgctgagtgggcatatttcacttaagacgtatcctaggaacggcccttgctttatgcacatacagacagaaatgaggcacacctgttcctgccctcagagtctataacccgaaggatagcatcagcaaagggtcctggaggtaagttggactctctgtttctcttttctctgcctttaagaataacagagtccttgagtatgagatactcatttgttttgtagtgtcagacactgtaattgggatgcatgctatatctatcaagtaagaatcaacccccctattgttgcagtggaaaaaaataaagagaaacattaatttaatagttggtggctttgcgaaggacagtataaatcctgttcagataaagtttcactgtgttgtttgcctgagcttaacctctgtgccaagagtatcattcctgagtttttttttgtctttgtagctcacaaatataccactcctctcattaaaccaatataatggagtagagttagcaaaatgacatcataataccatcatcttgcatttgtgtttcatagccttttctgcatacattacttttaatttgatttccacaatcactggttagagtcaggtacggcaccaggaggaataaggttctattgtaatggcgaatgtcagtgttagtttgatgtgaatagcattgaatctgtaaattactttgggcagtatggccattttcacaatattgattcttcctatccatgagcatggaatgtttttccatttgtttgtgtcctctcttatttccttgagcagcggtttgtagttctccttgaagagatccttcacatctcttgttagctgtattcctaggtattttattctctttctagcaattgtgaatgggagttcattcatgatttggctctctgtttgtcaattgttgatgtataggaatgtctgtgattttaacacattgattttgtatgctgagactttgctgaagttgcatatcagcttaaggagtttctgggctgagatgattgtgttttctaaatatagaatcatgtcttctgcaaacagagacaatatgacttcctctcttcctacttgaatacgcttcatttctttctcttgcctgattgccctggccagagcttccaatactatgttgaataggactggtgagagagggcatctttttattgtaccagttttcaaagaaaatgcttctagcttttgcccattcaatataatattggctgtgggtttgtcataaatagttcttattatttttagatatgtcccatcaatacctagtttattgagagcttttaacatgaagggatgttgacttttatcaaaggccttttctgcatctgttgagataatcatgtggtttttgtcttttgttctgtttgtgtgatggattatgtttattgatttgcttatgttgaaccagccttgcatcccaaggatgaagctgatttgatcatgatggataactttttagatgtgctgctgagttcagtttgccagtattttatcgagaatttttgcatcaatattcatcaggaatattggcctgaagttttctttttttgttgtgtctctaccaggttttggtatcaggatgatgctgactttataaaatgaattagggaggagaccctccttttcaattatttggaatagttttggaagaaatggtgtcagctcctctttgtacctctggtagaatttgatgtgaatacgggtagtcctgggctttttttggttggtaggctattaattactgccttaatttctgaacttgttattggtctattcagagattcaacttcttcctggtttaatcttgggagggggtatgtgtccaggaatttttccatttcttgtagattttctagtttatttgagcagaggcatttatagtattctctgatggtagtttgtcttttggtggggtgagtggtgatatcccctttatcattttttattgtgtctacttgattcttctcactgagcctgtatagccaagacaatcctaagcaaaaagaacaaagctggagacatcatgctacctgagttcaaactatactacaaggctacagtaaccaaaacagcatggtactggtaccataacagacatataaaccaatggaacagaatagagatctcagagataacaccacacatctacaaccatctgatctttgacaaatctgacaaaaacaagtaatggggaaaggatttcatattaaataaatggaaaactggctagccatatgcagaaaactgaaactggaccccttccttacaccttatacaaaaattaactaaagatagattaaagacttaattgtaaaaccccaaactataaaaaccctagaagaaaacccaggtaataccattcaggacataggcatgggaaagacttcatgacaaaaataccaaaagcaatggcaacaaaagccaaaattgacaaatgagatctaattaaactaaatagcttctgcacagcaaaagaaatgatcatcagagtgaacaggtaacttacagaatgagagaaaattttttcaatctatccatctgacaaaggtctaatatccagaatctacaaagaacttaaacaaatttataagaaaaaaaaacaaccccaccaaaaaatgggccaagaatatgaacagatacctctcaaaagaagacatttttgtggccaacaaacatatgaaaaaaagctcaacatcactgatcattagagaaatgcaaatcaaaaccacaatgagataccatcttataccagtcagaatggcaattattaaaaagtcaagaaacaatagatgcttgtgggactgtgaagaaataggaatgcctttacatgttggtgggattgtaaattagttcaatcattgtggaagacatgacaaaaattcctcaagaatctagaaccagaaataccatttgacccagcaatcccattactgggtatatacccaaaggaatataaatcattctgctgtaaagacacatgcacatgtatgtttactgcagcactatttacagtagcaaagtcacggaaccaacccaaatacccatcaatgataaactggatgaagaaaatatggtacatatataccatggagtactatgcacccataaaaaggaatgagattatgtcatttgcagggacatagatgaagctggaaaccatcatcctcagcaaactaacacaggaacagaaaaccaaacaccacatgttctcactcataggtgggagttgaacaatgagaacacatagacacaggaaggggaacaacacacactggggcctgttgaggggtagtgggggcaaagggagggaacccagaggatgggtcaataggtgcagcaaatcaccatgacaaacgtatacctatgtaacaaacctgcaccttctgtacatgaatcccagaacttaaaataaaataaaaacaaaagtaatggcaaagactacaatgacttttgtaccaaccaagtatcattttctctgtacataaggagactgatgctgaaagagtagaacttggtttaagccaagttcttagcaggtacttccccaacttctgatgccaacttgaaaacccactatggaaccagctcccacttgatttagaaggtcataaatgctagctttctagcatttttggtgatttggtgctcatctcctgctttattcaccttttttctctgagtccctatttcttattctacacactttcctgatatgacaataattggaatcattctcaactctccccttgatcttgtacctgagttctgatatggttgcttgtttgacatgcccccactcgttgccctggttagttccactcacactcatgctgtgcccaaggccacttgtgctacccattatggtggagcaagtcatgctacttcctttgtatcaatttgccttatcatctttatacaaattttccagccacaatgtatctctgtttagaataaaaccataaccagagtattacttccctcccaacttttaaattttctgtaaagactaatgtatcagactggcattgcatcttacattcagctaatcattggttccctgcagcgtcttcctcacctccaaatcaggaagtcagattcattctcttgctttttctttgcagttacaaaatagctttctctccctttcttattgtcctaatagttcttaaaattttcttgagttctgtttcttgttctatatccctttcatatctggaaaacctatacagctacctgacttctgttttttcaccttttttggccagaggcttagctaatcagggttatagttaattgtttcctgctacctcagacctgttttctatctctgtcctccatgttcctgtcactggcaacaacgttgctggtccctcttatctaatttttaatttctctattgtgcctcttccaagaaaactatattataatgtagagggaaacctaggaaggaaaaacgttcccaatcacatcagcaacttgttgcatctttattcctgtttacttctctgcctgacagctgtcccataatttccctgtggactgtggcttccttaacatggagtcccatgccctagtcctcagccaggttactgttggcatctctcagttattttccagctgataagaatagattaagaacaggtggccagcttctttggcccagagccaggaagtagaaaggttgagtaaaaaattaaaattattttcagtatttcaaagttaaatcatcttagactccaagttgtgacctggaagagaatgtcaaaaaaagaattggaagaatgtgaagaggaaaataatggaggcccagtataacaagccctaactagattattggcctctagaacttatgtcctatttccagctcttccgccaaccaagtagttgtgtgatttggagcaaatcagttcacctttttgaatcttgtaactagtctagttatcaggtctttccagtttgaagatgctaaaaaagaaaacagctaaattattccatctctctttagggcatcagacatgcctgttttattatcttctaaattttattcccaaagtgtgtttataagtaggagtaattttcctgggttattcccaagggtacaaactagagaccattcattatctagtctctgtctctctttttttcagctttattgaggtataattgacaaacaaaattatatgtaatcaaggtgacaatatgatgttttgatatacatataccctgtgaaattattgccacagttaagtaacacatccatcatctcatatagttaccttgttttgcatgtgtaatgagaacacttaagatctactccgtcagcacatttcaagtaataatacagtattattaagtatagtcacaatgctatacattagatctctttttataaagagacagccctgttctgtgccttgctcttttaaacactaagcctgtgtcctccatttttgtgaattggtctgacatagcagttttcaaatttgagagtgcatcacaatcacttaaaagtttattaaaatcatggctgggtgtggtaactcatgcctgtaatcccagcattttgggaagctgaggcaggtggatcacctgacatcaggagtttgagaccagcctagtcaacatggtgaaatcccgtctctactaaaaatacaaaaattagctgggggtggtggtgcatccttgtaatcccggctacttgggaggctgaggtgggaggatcacttgaaccctggagatggaggttgcagtgagccaagattgtgccactgcacttcagcctgggtgacagagagagactttgtcccccacccccccaaaaaaagtttattaaaacatagactgctgtgtcctacccaagagtttcagaaggtctgtaatgaggcccaagaatttgcatttctaaattctggctctgtcatttactgtttgtgtgtctttgaggaaatttattttatcagtctaagccttggttttctcatccataaaatgaggcaaaaatattttgtttcctatggtaacttctgctgtgtaccagtgcctacaattttgccaaaatttatttcctattcccttgttttcttccaacttcatttgaaagattctaggaaaataatcagatcatggattatcattagatagcaaccatagtctcacaagaagaccatttggggggaaataaatatctattctaagagtcttgtgaaaggatataattttagcaagttcaatagaaatctttctgaacactcaagaaagtgagaagaaaagaatcttctcacttaaaactctcaaatatttttcagttatagcatatgtggcccagatatattagcatttgttatatatctagaatctaaagagaattatatcaggtctaaaatgaggcatagtataatcactggacctgacagagcagggctgtcttttctgtatgaccagggtgagtcagagctctgtaccccactgtccaccagcccctcccagagtccctgtctggcatgccagaatgcagcacagcctcagctaacctaccagggtgcttttgccagtaaccactgccatagcactttctttggaggcccccccaccccaccctactggagtgcttttgctgacagcctcccaccagagcgcttcctactcattcccccctgccccaccactgccctagacacagtgctgttgccagtggtccaggagcaccttgacccctccagccaagctggttcttgaccttgagaaattagaggacaaagtcatgggcacagtcccagccacccaaggttagagcatgcagaccaggagtgcagagctgagccttggccctctgaaagcatctagaaatgaagccattcacctatacccaactttcagcagagtcaaaccctcaaggacagtaacgaatataaaacaaaaagccctatccaaagaactttttatttaaattcaaaggataaaggaaaatcagttctcacagatgagaaagaaccagtgccaaaatcctggcaaaagtgtcttcttacatccaaatgatcatactagctccctagcaatggttcttaaccagattgaaatggctgaaatgtcagacatagaattaagaatctatggcaaggaagttcatcgagatacaagagaagattcaaactcaatctaaggaaaacagtaaaatgatccaaggattgaaagatgacataaccttttaagaaagaatcaaactgaacttctggaaatggaaaatttactacaggaatttcaaaatacaattggaagcatgaagaatagaacagatcgagctgagaaaagaatctcagaacttgaaaaccactccatcaaagaaacacaggcagacaaaaataaagaaaacagaatttagaaaaatgaataaaacctctgagaaacatgggattatgcaaagagaccaaacctacaactcactggcattcctgaaagggaaagagagagaggaagcaacatggaaaacatatttgaggatacagtccatgaaaatttccccagtcttgctttcagcatgcatattcaagaaattcaaagaacctgtttaagatactatataaagtaactatccccaagggacatacccatcagattctctaaggtcaatgcaaaagaaaaaaatctgaaaggcagctagagaaaagaggcaggtcaattacaaagggaactcgtcaggctaaaagcagacatttcagcagaaaccttataagccagaagagactgggggcctattttcaacatcattaaagaaaagaaattcaaaccaagaatttcatatcctgtcaaactaagcttcacaagcaaaggagaaataagattcttttcaaacaagcaaatgctaagagaattcactaccactaggcacaccgtacaagaggtcctaaagggagtgctaaacattaaacatgggaaagaaagatacatgccaccacaaaaaccacactttacatttactattgacactataaagcaactatacaattaagttctatataacaactatctaacaccacaatgatagaatcaaatcttcccatatcaatattgatatgtaaagtttcaggatacaaaatcaatgtacaaaaattagtagcatttctatgcacaaataacatccaagtgagagccaaatcaaaaacctaatcccatttacaatagccacaaaaggaacaaaatacctagatatacagctcaccaaggaagtgaaagatctctaattagaattacaaaatactgctgaaagaaatcagagatgacacaaacaaatggaagaacatcccattgtgcatggattggaaaaatcaatattgttaagatggtcatacttttcaaagaaattcactatcctatcaaactatcaatgccgtttttcacaggattagaaaaaaactaatctaaaattcatatgaagctaaaaaaggagcctgaattactgaaacaatcctgaaccaatagaacaaagtcagaggcatcacgctacctgacttcaaattatactacaatgctacagtaaccaaaacagtatggtactggtacaaaaacagacacatagaacagtggaacagaatagagaacttagaaataaagccacacacctacaaccacctgatcttcaaccaagtcaacaataacaaacaatgggcaaaggactccctattcaataaatggtgctgggacaactagctatccatatgcagaagaatgaatgtggacccctatctttcaccatgtacaaaaattaactaaagatggattaaagacttaaatgtaagacctaaaacattaataaccctagaagggaaggaggcaaagcaacatggccaaacagaagcttccaccaattatcctccccaaatttggaacaccgaattcgacaactatttacacaaaagaaaccctcataagaaccaaaaatcaggtaaacaatcacagtacctggttttaacttcatattgctaaaagaagcattgaagaggataggaaagacaatcttgaattaccaacaaaacccctccctcatctcctggcagtggccatgtggcacagaaagagaatctgtgtgtttggggaagtagagcacagtatttgtgagactttgcattggaactcagtgctgccctgttacagcagaaaacaacaccaggcagaactcagcccatgcccacagagggagcatttagatgagccctagatagaggggaattacccatgccagtggttggaacttgagtttcagcaagcctaaccactatggggtaaagggctctggggtcctcaataaacttcagtggcagtctaggccacaaggactgcaactccaaggcaagtccaagtgctataatgggcttggagccagtagcctttgggggcacgtgacctagtgaaacaccagctggggtaactaaaggagtccttgtgtcatccctcccccaaccccaggctgtgcagcttgtaactcctaaagaggcctcttctatctgcttgaggaaagaagaaaaaggagtaaagaggactttgttttccaacttgaataccagtttagccacagtaggatagggcaccaggcagagtcgtgaggcccccattccaggcccagtagtacacactgtgggccttgggtgagactctgagatgtgctggtttcaggtgtgacctagcatatccatagctgtgatggctatgagaagagactctttctgcttgaaaaaagcagagggaagagtaaaggggactttgttgttctgcaatgtaggtaccagcttgaccacagtggagaagaacactaaggctctttgggtccccagttttaggacttggctcttggatggcacttgtggtcctaccctgggccagaggggagactactaccctgaagggtgagtcccaggcctgcaaaatccaccacaagctgactaaagagcctttgggatgtaagtgaacactggtgataccctggcaatacttcccatgggcctgtggtagtagtggacatgaggagagactccgctgtctggagaaagaggagataagagtgggaaggactttgtcttgtggtttcagtgccagcttaattgcagtaccctagaatatcagatagatttctaatgtttccagctttaggccctggctcatggacaacatctctggacctgtctgagaactcactgccttgaagggaagaacataaaacttgctggtattgccacctgctgattgtagagccctagggccttgagtgaacataagcagtagccagatagtggttatagcaggccttgggcaagacccagttctgtgctggctttaggtctgtgcaagcacggttcctgtggtggttgccacacaagtgcttgtgtcaccccttccccagctccaggcagctcagcaccaagaaaaagactttgtttgtttgggagaaggtaagagaagagaacaagactctctgtctgataatccagaaaattctcctagatcttatccatgaccaccaaggtggtaggtacctctatgagtctttaggaactacagcattactgggctgggggtgctgcctaatgcagatatggcttatattgcaacacttgagtcccttcaaataccctgaaagccttcccaagaaggatgggtacaaacaaatccagaatatgaagactgcaataaatatctaactttttaatgcccagacactgacaaacatccacaagcatcaagactatccaggaaaacatgacctcaccaaacaacctaaataagtcaccagatcccaattctggagcaacggagatatgtgacctttcagacataattcaaaatagctatgttgaggacactcaaagaaattcaagataacatagagaaggaatatagaattttctcagagaaactcaacaaatatattgaaataattaaaaagaatcaagcagaaatcttggaattgaaaaatgcaattgacatactgaagaagacatcagagattttaaataacagaattgatcaagcagaattaaaaattactaagcttgaaaacaggctgtctgtaaatacacagtctgaggagacaaaaaaagaattaaagaataaagcatgctgatgggatctagaaattagcctcgaaagagcaaatgtaagagttattggtcttaaagaggaggtagagaaagagtttggggtagaaagtttattcaaggggataataacacagaacttcccaaacctagagaagtcagtaacattgacttaaatatgtcaatattcaagtacaagaaggttatagaacaccaagaagatttaacccaaagaagactacctcaaggcatttaataatcaaactcccagaggtcaaggatactgaaagcagcaagataaaaaaaacaaataatgtacaatggagctccagtacatctggcagcagactttttagtggaaaccttacaggtaaaatgcttttttccccccttgatcactttaactatggtatgacaattttaaaatgctgaaggaaagaaaatcttttatcctagaatagtatatccagtcaaaatatcctttaaacatgaaggagaaataacaactctctcagacaaacagaagctgagggatttcatcaataccagacctgtcttacaggaaattctggaaaaagtacttcaatcagaaataaaagaatgttaatgagcaataagaaatcatctgaaggtgcaaaactcactggtaatagtaagaacacagaacaacacagaatattataacactgtaactgtggtgcacaaactactcttaagtagaaggactaaatgaaccaataaaaatgataaacccaacaacttttcaagacatagatagtacaataagatataaatatagaaacgagaaaaagttaaaaagcatggggacaaagttaaagcatagagtttttattacttttttttttgcttgattctttttgcaacaatgttaagttgttcagcttaagaaatgagttataaaatagtatatgcaagccttatgataacctcaaatttaaaaacatacagcagatatataaaaagttgaaagcaagaaattaaattatatcaccagagaaaattgccttcactaaaaggaagacaggaaggaaggaaaaaaggaagagaacaccacaaaacagccagaaaacaagtaacgaaatggcagaagtaagtccgcacttatcaataataacattgaatgtaaatagactaaactctccaataaaaagatgttgagtggcttaatggataaaaaataagacccaatgtcctgtagcctacaagaaacatacttcacttacaatgacacacatagagtgaaaataaagggatggaaaaagatattccatgacaatggaaatcaaaaaagaacagaaattgctttacttatttcagacaaaatagactgcaagacaaaacctataagaagagacaaaaaagattactatataatgataaaaaggtcaattcagcaagaggataaaacaactgaaaatacatatgcacccaacagtggagcacccagatatataaagcatatattattagagctcaagagagaaataggccccaatacaataatagctggagacttcaacgcctgctttcagaattggacagatcttccagacagaaaatcaacaaagaaactctggacttaatctgcactatagaccaaatggacctaatagatatttacagaacatttcatccaacaactgcagaatacacattttttttcctcagcaagtggataattctcaaagatagattatatgttaggtcacaaaacaaatcttaaaacattcaaaaggattgaaacaatatcaagcatcttctctaaccacaatggaataaaactagaattcaataacgaggaattttggaaattatgcaaaaacatgaatattcaacaatatgcatgctcctgaatgaccagtgggtcaatgaaaaagttaagcaggaatttgagaaaatgcatgaaaccaatattaatggaaacacaacataccaaagcctatgggatacaatgaaagcagtactaagagagaagtatataactctaaatgcctacatcaaaatagaagaaaaacttcacacaaacaacctaacaatgcaccttaaagagaaaaacaagaacaaaccaaacacaagattagtagagaaaataaagatgagagcagaaatacatgaaatggagaaaacaattcaaaagatcaacaaaacaaaagttgtttttttgaaaagataaataaaactgacaaacctttagccagactaagaaaaaagagaagactcaaataaaatcagatgaaaaaagagacattacaatggatactgcagaaattcaaaggataattagtggcaactatgagcaactgtatgccaataaattgaaaaatatacaagaaatggataaactcctagacacatacaacctaccaagattaagtcatgaagaaattcaaaacctgaatagaccagtaacaagtaatgagattgaagccataataaaaagactttttagcaaagaaaagcctgggaactgatgtcttcactgctgaattctaccaaacatttaaagaagagctaatactaatcctactcaaactattccaaaaaatagaggaagaggaactatttccaaactcattgtacaaaaccagtattaccatatataaagtaatcctacttacaatacctacaaataaaatcaagtacctagaaattaacttaaccaaataagtgaaagatttctacaataaaaactgtaacagattggtgaaagaaattgaaagaaacacaaaacaatggaaaaatattccatgttcatgaattggaagaaccaatattgttaaaatgtcagtaggaccccaaacaatccaaagatcaaatgcagtccctatgaaaataccaatgacattcttcacagaaatagaaaaaaaaatcctaaaatctatatggaaccacaaaagacccagaatagccaaagctatcatgatcaaaaagaacaaaactggaagaatcacattacctgtcttcaaattatactacagagctacagtaaccaaaatagcatggaactggaataaaaacagacacatagggacagaccaatgggacagaatagagaacctagaaacaagtccatacatatacagcaaactcatcttcacatattctcgtttatctgtgggaggaaaaaattaaaacaattgaactcatagagaaagagagtagaatgatgattaccagaagctagaaaaggtagttgattggggtgatggaaatggggatgtttaatgggtataaaaaatagaaagaatgaataagaactagtattcaatagcacaacaggatgactatagtcaataatcatttaattgcacatttaaaaataaccaaaagagtataattagattgtttgtaacacaaaagacaaatacttgaggtgatgtacatcccatttatcctaatgtgattattacacattgtatgcctgtatcaagatatctcatatatcccataaatatatacacctactttgggcccacaaaaataaaaaataaaacccttgaagaaaacctaggaagtaccattctgtatatcagccttggtaaataatttatgattaagtctccaaaagtaattgcaaaagaaacaaaaattgaaaagtaggacttaattaaactaaagtgcttctacacagtaaatggaactatcaccagagtaatcagacagcctacaaaatgggagaaaacattcggaaactgtatccaactgtattgtccatactcacactgctataaggacatacctgagactgggtaatttataaagtcaggaggtttaattgactcacagttttgcagggctggggagacctcagaaacttacaatcatgacagatggggaagtaaacacgtctttcttatgctgagcaaaggggggaaagccccttataaaacaatcagatctcgtgagaactcactatcatgagaacagcagcatgggggtaactgcccccatgattcaattacctcccaccgggtccctcctatgacatatggggattatggaaactacaattcaagatgagatttgggtggggacacagccaaaccatatcaccaataaaggtccaatatccagaatctataagaaacttgaacaattcaacaaaccaaaaacaaataactcccttaaaaagtgggcaaagcacatgaacagacacttttcaaaagaaaatgaacatgctgccaacaaacatatgaaaaaatatgctcatcaccactactctttgagaaatacaaattaaaaccacaatgagataccatctcataacagtcagaatcactattattaaaaagtcaaaaaacaacatactgatgaggttgtggaggcaagggaacaattatacactgccggtgggaatgtaaattagttcagctattttgaaaacctgtgtggagatttcttaaataacataagatagaactaccatttgacccagcaatcccagtactggttatatatccaaggaaaaaaaaattgttctaccaaaaagacacatgtactcgcatgttcattgcagtactatgtacaatagcaaagacatggaatcaaccaagatgttcatcaacagttgattggataaagaaaatgtggactatatataccacggaatactatgtagtcattaaagtaatgaaatcgtagcctttgcagcaacatagatgcagctagaggccattatcctaagcaaactaatgcaggaacagaaagccaaataccacctgttgtcacttatgagcagaagctaaatattgaatacacatggacataaatatggggaaaaaagacactgggcaatacttgagtggtaagggtgcagggtagtgtgggttggaaggctacctcttgggtactatactcactacctggttgatagggttattcatacaccaagcctcagtgacatgcaatttacccatgtaacacacttgcaaatgtacccctagaatataatatgaaagtagaagaagaaaaaattgaacatgtactgtaataaaagaaactttactacaagaagctataaattgtacaatcgatttatgaaagcagtattgaaaaacctagataatccaaaaataaatgaatggtttagtcataaaaaatgaggcataaaaatcttaaggaaatacataattgtcattttttattatattttaatatgtaggaattagaaaggtatatctgaatgggtgactaagaatatttggtatctattattggattaatgacacaagttcacttatcccagtcatacgaatcatagtaggaaagagataggaggaagggctcttggattaggcaaatacagaaaaaatagtaaagagagttggaaactactattgtagatattattattagaggaaagtgtttgaaattcctttaattcaccgtgaaaaactcaaatatgtgaagtcgttcagatatgagtccttgctataatttgtttcattggagattccatgaaattttacatagacatgtagatcatctgcaaatagggacagttttatttcttcctttccaatacgtgtgtttttaaaattccaatggcaacaacttccattactacattgaataaaagtgttgagaatgaacatccttgctttgatcttgaagttaaagagaaaggttttcaccagtaagaatcatgttagccacaggtttttaatggatgctccttatgaagttcaggaagttccctatattcttagtttgctcattttttggtttttacatgtacagggttgtttaaacaaaacaaagactataaaacaaagactataaaacaaagactatatatggcatgaaaagccgaaaatatttactatgaagtcatttacaaaaaagtccaacctttagtctaaagatagcaattgaaagacaaagatgatcagaatgaataaaagcatcatccacctatatattgtctgtaagaaattcacttacaatgatataggtagaataaaagaaaaatggtggaaaagatataacatgtaaatactaattaaaataaagctggaattgatatattaatgtaacacctaggaaacatcataataaagaaaattactaggaaaacgatgatcattatataatgataaaatggtcactttaccaataagatgtaacaatcttcaatgtgtgtacatcaaacagcaaaacttcaaaatacttgatgtaaaagctgacaggaatgaatagagaaattgagaaatacacaattatagttagaggactttaacacccctctcccagtaatttataactgactagactgaaaattagtaaggatagcgatgaaataaacaattccataattagcaagatttaattagcatagtcacaacccatccatgtggaatatatggtatattccacaaccgtagcagaatatacttctcttcaaaggcacatgaaaaatcatcaagatagagtacatactgggtcataaaacaaactataacaaacttaaaataatttaaatcttataaaatatgttttatgaccttaatgaaatcatactagaagtgaataacaaagagataacaggaaaatcaccaaacatttggaaactaagcaacacatttttaaataatctaaagtttaatgagaaagtttcaagggaaataaaaaaaatgtattgaactaaaagtgatgaaaatgcaacatatcaaaatctgtgggatacaattaaattagtgcttacagcaaaatttacagcaacaaataaatgcctatagtagaaacagaaggccaggtgtggtggctcacacctgtaatcccagcactttgggaggctgaggaaggagcatggcttgagcccaggagttcgagaaaagcctcaggaacatggcaaaaccctctctctacaaaaaataaaaaataattaaccaggcatggcagtgttgcctgtagtctcagctactcaggaggctgaggtgggaggattgcttgagcccaggaggttgaggctgtagtgagctaagatcatgtcactacactccagcctcggtgacagacagagtaagaccctgtctcaaatttaaaaataaaaaaaaaagaaaagaagaaaaatctcaaatcaataagtttccacctgaacaaactagaacaaaagagcaaaaataagacaaagcaagtaggaaagaaaaataataaagataatagcagaagttgaaaaagtaaaaacaatagacgatactctatattgctaacaatagagtatatactatagtgtacagtttattgttatacatatctgtatctatattctatatatacactatatttttatacatggatataaaattgaataaataaagttgcctctagcaatactgacaaagagaaaagagagagaaggcacaaattaccaatatcaagagtgaaacacaggatgtaacttgcagaggataaataataagggaatactatgagcaactctatgcacacaaatttgaccatttagatgaaatagactaattgctcaaaatctacaaattatcaaagcaaacatgaaacagataatctttaatagtcttataaaaacctgacaaagaaatctccaggcccagacacttgcagcgatgatttttaccaaatattaaaagaagaaataagaccaattctgagcactttctttcatcaaatagaagaaacagcaacacttcccaactcatatggtgaaggcagctatcctgatacctaaaccaaagatagtacaagaaaggaaacctacagaacaatattctttttgaatgtggatgaaaaaaaaaacccttaacaaaatactaaaaatagaatctatcaatatttggaaagaataatataatatgcccaagtagaatttatttcaggaatgtaaggctggtttaacacttaataatcatagtcaatcaatacaaaccacaataaagaataaaaactacattattaaatcaactgatgcagaaatagcacttgacaaaattcaacacccactcataaaaaatctaagtaaactaaaacttaaagtaacttccccaacctgataaacaacatcttcacaaaacctaacataatacttaatattgacagactgaatgctttcccctttatgtggggaaaaaggaaatgatgtcagctgtcactctcatagtcaacataatgcttaaagtccaacccagtgcaagaaggaaagaaaagaaacggcataagaggaagggagaaaaaagatgtttgtttttattttcagatgacaagatcgtcgttatagatgatggcaaggagcctactaacaaactactagagcttacaaatgagtttagcaaaatgtcactataaagaaaaataaatcatatttatacatgctagcaacaaacaacccaaatgaaaatagaaaaattttttttattatactttaattttagggtacatgtgcacaacgtgcgggtttgttacataggtgtacatgtgccatgatgctgtgctgcacccattaacttgtcatgtagcattaggtatatctcctaatgctatccctcccccctccccccactccacaacagtccccggtgtgtgatgttccccttcgtgtgtccatgtgttctcgttgttgaattcccacctatgagtgagaacatgtggtgtttggttttttgtccttgcaatagtttgctgagaatgatggtttccagcttcatccatgtccctacaaaggacatgaactcatcattttttatggctgcatagtattccatggtgtatatgtgccacattttcttaatccagtctatcactgttggacatttgggtgggttccaagtctttgctattgtgaatagtgccgcaataaacatacgtgtgcatgtgtctttatagcagcatgatttatactcctttgggtatatacccagtaatgggatggctgggtcaaatggtatttctagttctagatccctgaggaatcaccacactgacttccacaatggttgaactagtttacagtcccaccaacagtgtaaaagtgttcctatttctccatatcctctccagcacctgttgtttcttaacttttcaatgatcaccattctaactggtgtgagatggtatctcattgtggttttgatttgcatttctctgatggccagtgatgatgagcattttttcatgtgtcttttggctgcataaatgtcttcttttgagaagtgtctgttcatatccttcgcccactttttgatggggtcctttgcttttttcttgtaaatttgtttgagttcattgtagattctggatatttgccctttgtcagatgagtagattgcaaaaattttctcccattctgtaggttgcctgttcactctgatggtagtttcttttgctgtgcagaagctctttagtttaattagatcccatttgtcaattttggcttttgttgccattgcttttggtgttttagacatgaagtccttgcccatgcctatgtcctgaatggtattgcctaggtttacttctagggtttttatggttttaggtctaacagttaagtctttaatccatcttgaattaatttttgtataaggtgtaaggaagggatccagtttcagctttctacatatggctagccagttttcccagcaccatttattaaatagggaatcctttccccatttcttctttttgtcaggtttgtcaatgatcagatagttgtagatatgtggcattatttctgagggatctgttctgttccattggtctatatctctgttttggtaccagtaccatgctgttttggttactgtagccttgtagtatagtttgaaatcaggtagcgtgatgcctccagctttgttcttttggcttaggattgacttggcgatgcaggctcttttttggttccacttgaactttaaagtagttttttccaattctgtgaagaaagtcattggtagattgatggggatggcattgaatccataaattacctcgggcagtgtggccattttcacgatattgattcttcctacccatgagcatggagtgttcttccatttgtttgtatcctcttttatttcattgagcagtggtttgtagttctccttgaagaggcccttcacatcccttgtaagttagattcctaggtattttattctctttgaagcagttgtgaatgggagttcactcatgatttggcactctgtctgttattggtgtacaagaatgcctgtgatttttgcacattgattttgtatcctgagactttgctgaagttgcttatcagcttaaggagattttgggctgagacgatgcagttttctagatatacaatcagtcatctgcaaacagggacaatttgacttcctcttttcttaattgaataccctttatttccttctcctgcctgattgccctggccagaacttccaacactatgttgaataggagtggtgagagagggcatccctgtctcgtgcctgttttcaaagggaatgcttcctgtttttgcccattcagtatgatgttggctgtgggtttgtcatagatagctcttattattttgagatatgtctcatcaatacctagtttattgagagtttttagcatgaagtgttgttgaattttgtcaaaggccttttctgcatctcttgagataatcatgtggtttttgtcgttggctctgtttctatgctggattacgttgattgatttgtgtatgttgaatcagccttgcatcccagggatgaagaccacttgatcatggtggataagctttttgatgtgctgctggatttggtttgccagtattttattgaggatttttgcatcgatgttcatcagggatattggtctgaaattctctttttttttgttgtttctctgccaggctttggtatcaggatgatgctggcctcataaaatgagttagggaggattccctctttttctgttgattggaatagtttcagaaggaatggtaccagctcctccttgtacctctggtagaattcagctgtgaatccatctggtcctggactttttttggttggtaagctattaattattgcctcagtttcagagcctgttattggtctattcagagattcaacttcttcctggtttagtcttgggagggtgtatgtgtctaggaatttatccatttcttctagattttctagtttatttgcatagaggtgtttatagtattctctgatggtagtttgtatttctgtgggatcggtggtgatatcccctttatcattttttattgcttctatttgattcttctctcttttcttctttattagtcttgctagcggtcaatcaattttgttgatcttttcaacaaaccagctcctgtattcattgattttttgaagggttttttgtgtctctgtttccttcagttctgctctgattttagttatgtcttgccttctgctagcttttgaatgtgtttgctcttgcttctctagttcttttaattgtgatgttagggtttcaattttggatctttcctgctttcccttgtgggcatttagtgctataaacttccctctacacactgctttgaatgtgtcccagagattctggtatgttgtatctttgttctcattggtttcaaggaacatctttatttctgccttcatttcgttatgtacccagtagtcattcaggagcagattgttcagtttccatgtagttgagtggtttggagtgagtttcttaatcctgaggtctagtttgattgcactgcggtctgagagacagtttgttataatttctgttcttttacatttgcttaggagtgctttacttccaactatgtggtcaattttggaataggtgagatgtggtgctgaaaataatgtatattctgttgatttggggtggagagttctgtagatatctcttaggtccgcttggtgcagagctgagttccattcctggatatccttgttaactttctgtctcgttgttctgtctaatgttgacagtggggtgttaaaatctcccattattattgtgtgggagtctaagtctctttgtaggtctctaaggacttgctttatgaatctgggtgctcctgtattgggtgcatatatatttaggatagttagctcttcttgttgaattgatccctttaccattatgtaatgcccttgtctttttttatctttgtctgtttaaagtctgtttcatcagagactagcattgcaaaccctgacattttttgttttccatttgcttggtagatcttcctccatccctttattttgagcctatgtgtgtctctgcacatgagatggatttcctgagtacagcacactgatgggtcttgactctttatccagtttgccactgggtcttttaattggagcatttagcccatttatagttaaggttaatattgttatgtgtgaatttgatcctgtcattatgatgctagctggttattttgctcattagttgatgcagtttcttcctagcctcgatggtctttacaatttggcatgtttttgcagtggctggtaccggttgttcctttccatgtttagtgcttccttcaggagctgttgtagggcaggcctggtgatgacaaaatctctcagcatttgcttgtctgtaaagtattttatttctccttcacttatgaagcttagtttggctggatatgaaattctaggttgaaaattcttttctttaagaatgttgaatattggcccccactgtcttctggcttgtagagtttctgctgagagatcagctgttagtctgatgggcttccttttgtgggtaacccaacctttctctctggctgcccttaacattttttccttcatttcaactttggtgaatctgacaattatgtgtcttggagttgctcttctcgaggagtatctttgtggcattctctgtatttcctgaatctgaatgttggcctgccttgctagattggggaagttctcctggataatatcctgcagagtgttttccagcttggttccattctccccgtcactttcaggtacaccaatcagacgtagatttggtcttttcacatagtcccatatttcttggagtctttgttcatttctttatattcttttttctctaaacttctcttcttgcttcatttcattcatctgatcttccatcactgataccctttcttccagttgatcaaattggctactgaggcttgtgcattcatcacgtagttctcgtgccatggttttcagctccatcaggtcctttaaggacttctctgccttggttattctagttagccattcgtctaattttttttcaaggtttttaacttctttgccatgggttcgaacttcctcctttagcaaaaatcacccgtcttctgcgtcgcttacgctgggagctgtagactggagctgttcctattcggccagcttggctcctcccccaaaaatcaaaatttaaaacataccatttacaatagccctcaaaaataaaatatgtaggtataaatctaatagcttatctatgagatctttctattgaaagcagtaaaacttcaataaaaaacagttaaagacctaaacaaatggagagatatacaatattcatgaattggagaactcaacttaaaaagatgtcaattctccccacaatgatttattcatttaattccatttctgttaagatctcatttaactccatttctattaaaatggatttttggtggatatcaacaagcttattctaaaattgttgtgaaaaggcaaaggaactagaataactaaaacaattttgaaaaagaataacaacagaagagtaattcaatctgattttaagatttactatataactacagtaataaaaaacagtgtggacttcatggagggattgtcacatagactaatacaacaatagagagttcagaaacatgcacagaagtccagccaactgatttctgataaacgtgcaaaacaaattcaatggaaaaagcatatttttaaaataaatggtgcataatgcatttggaattcatacatgtttttgtgtcagtagttcttccttttttgctataattatattcagtggatgtactatattttatttatctatttttcaagtgaaggacatttgggttgtttctggtgattataaatgaagcggtataaacagtaatgtttagggtttttttgcgaacataagttttcatttttctttggaaatacctggaagtgggattattgggtcatataataggcatatgcttatttttgaaagagactactaaacagttttccaaagtggttgtaccatattgaatttctctcagcaatgtatgagatttgcaattgccctgcattgtcactcacacttggtaatgtcattattttgtattttatccattttatttgtgtgaagtggtatctcattgtgattttaattttcactttcctaatgatgagtagtattgtgtaatgatttctaatgactaataactcatttgatatctgtgtcttttttggtgaagtgcctgttcttttgtcccctttttgggggttgattatgttattattattgagttgtgaaagttctttatttgggctacaagttctatgtcaaaagtgtaagttgcaaatatcttttctaagtgtatggcttatcttttcattctcttaacagtgtatttcatagaacagaaattacacgttttgattaagtctcattaaccattcttttcctgttatcagttgtgcttttggtgctgtagttagaaaatgtttgcctaacccaatgtcataaaattttcttttatgttttctttgagaagttttataattttaggttttacctttaggtgtattagccattttgagttaatttttgtatgatatgtaaggtatgggtcaaggttttttttttcatatggacgtccaattttcccaacatcatttattatttagttcactaatacttcttcagttatgttaaataattttatctttaaaatttctagtgagttctttttagctattatatttttcatttctaaaacttcaatttgttttttttattttacaaggtctttttgatatgttctttttatttgctcattagtaattttttatttttttaaacatttcattcatattgttttatattgtgtatccaataacacagtatgcatttttaaaggtgtatcatctttatttgttgttgtttaaaggtttccttaaattttagctgtaaaacaaatatatctacattaacattttttatttttaatttttgtggttagatagtatgtacatatatttatggggtacataagatgctttgatatggcattcaatgtgtaataattacatcatgaagaatgaggtatccattccttcaagcgtttatcctttgtgttacaaacaatccacttatactctttattttaatatatacaattaagttattgtcgactttagtcactctgttgtgctatcaaatagtaggtcttattcattctttctattttttttgtacccattaaccatgcccatcttctcgcccaacccctcactacccttcccagcctctggtaatcatcattctactctctatgtccaattgttttgatttttagatcccacaaataagggagaacatgtgatgttgtctttctttgtctggcttatttcacttaacataatgatctctagttttatccatgttgctgcagatgataggatctcattccttttttatggctgaagaatactccattgtatataagtgccacattttctctatccattcatctgttgatggacacttaggttgcttccaaatcttggctgttgtgaacagtgctgcaacaaacatgggaatgcaggtatctctttgatatatttatttcctttcttttgggtatatacccagcagtaggattgctggttgatatggtagctctatttttagttttcttgaggaaactccaaatttttctctatagtggttgtattattgtctgctacttttattcatggttgcttgtttccctgtatattggtgatttcatattgtgagctcgtatttaattgatcttattctgtgagacactgagagtctaaattggaattgctgtcaccataaaagatttgtatgtttctaccaggagccagtggttctactagtctggcaccacttttactttgtttgagaatctaagcccaatgcagaggacttaggtttagtttctcatcttgttctaggtttagtctcccctttctaatactggtttcaacatttgtcctagaataaaaatgctatcttttgctcttccttattgttcatcattctggctacagctcattgtctctttcccaccctccctccacctccaccttacgtgacctatgtggtgacatgtcttactttcttataagctcagcaatgctttgaaaagattgattgtgtaattcattgaggatctagttatattttgagtgcttttttatggcttttataagggctttttagaacatttattagctatactgcaggaagcagagatgttttatttttctttttaaatgctgtacctagaaatggtcacatgtcatatatgtcatatctgaataaaaaaggcccagcgctgtggctcatgtctgtaatccccacactttaggaggctgaggcaggtggatcacttgaggtcaggagtttgagactagcctgaccaacaacaccgtctctactaaaaatgcaaaagttacccaggcgtggtggcaggtgcctataattccagctactcaggaggttgaggcaggagaatcacttgaacccaggaggcagaggttacagtgagctgagatcacaccactgcactccaacctgggagatggaataagaccctgtctttataaaaaataaaaaaaaaagaattaagacaaaaactcatttttttttcaggttcacagtccaagtaggttctagagtagccttttaccctcacttttcattttttattgacatactgagtgtagacactgttagtcattcatcttcagaaggtctatgagaagaaacattctagaaaatctagaacacatcctagaaagccaattgcagagcacaattgattctcaatccttgtcctttgggatagagaacattaacttctttttactcagtcatattggggaaaagaaaaactgtagatttacgaacctcagtggcacatgctgtctcacagaagcaatcatgaaacctgtggtcacagtttctacaaggggcaaacgtgtgtcagctggaaggcatgggaactgttctccattatggaaatatgggtggaatatttcatatgtcttccaactttaatctcttttttaataaaatagatctgttgtattttaaataagcccagagggctataaagaactggattcaagtgtggacccaatgtaaagttttaagaaaattgctatcagggaaggtagatatattacctgcccagtgacctcttttctaataagcataatttttgttctcatttcatttgttctttttcggtattcattttgtttaacacagaactggactttcttttctttctttctaaatctaaaacagagcttctgtttctaaggaaaaacataagttaattgaattcttgctatggtttgaacatgtccccaaacgttcatgtgtcggaaacttaattcccaatgcaacaatgttgagaggtgggacctctaagaggtgattaggtcatgaggggtctgccttcatcaatagattaatgctgtcatgacaggagtgggttagttgtggaaggagtgtgttccctgtaaaaacatacatttggtccactcacctatgctctcttgcctttctgccttccaccatgggatgatgcagcaaaaaggccctcagcagatgcggtctctctgtcttggacttcccagtctatagaaccatggccaaatacatttctgttcatttaaaattacctgttctgttgtattctgttatagcagcacaaagtgaactagaacagtgctcactgcaaaacatgttcttatttgtcccaaaactaccatcacctctcctttcccccttcctatgaaaagacagaaatgtcatgtgtttccaataaagataacaacttctgaaatatatatcaagtgtatactgtgtcaggatagggctgccagataaaatacagattgcctgattttttttttttttctgtatatgtagcaaaccctagtcaaaaaccaggtagacaggtcacttggggtcaggagttcaagatcagcctggccaacatggtgaaaccccatctctattaaaaatataaaaactaggcatggtgtggtggctcacgcctgtaatcccagcactttgagaggctgaggcaggcagataacgaggtcagcagttcaagaccagcctggccaatatggtgaaaccccatctctattaaaaatacaaaaattagctgggtgtggtggcacatgcctgtagtcccagctactcaggaggctgaggcaggagaattgcttgaacctgggaggcggaggttgcagtgagccgagattgcgccactgcactccagcctgggtgacagagtgagactccatctcaaatcaataaatcaataaataaaaataaaaactagctggtcatgatggtgggcacctgtaatcccagctattcaggaggctgaggcaggagaatagcttgaacctgggaggcggaggttgcagtgagctgagatagtgccactgcactccagcatggatgacagaacaagactccatctcaaaaaataataattaaaaaaaagaaaaagaaaccaggtaggtactttacacagtttatctgaaatatttatgaaagactacaaaagacaaacaatgaagtaggaatttgaatccagctgtgtcttgttcctaagtctagacatttctgcatattccttgtcccacactgactatagaaatctatgtaacaaaagccattgagaatacacagtggaattgatacctgtgctgaacttccatcttttctagaacgaaggcacttatatcacctaagaattaagattctacccagaaacccacagagagtttgagaataaattgtcaaaaggctcaaatatccagaaaaagaagtgagagaaaaaaaacttttacatattttgaccttttattactctccatggtttaagacataacatgttctgaaacatgatttttataaatggcatacttggggccaaaaatataaacaaaaagctattcccatcagacccctcaatagctattaacataattatttctaattttccattgagtgaatgttctgtgatttaataaagtgaattattttttaaaattgcaagaaaggaggcttatttttctttagctttaaaaggatcaaaaatttattctgaataaaattatgagtgtggtcatataatagttgaaaggctaagatagcaaactatctcacgcttgtgtaccaatttgtgagaattgaccattttcagacagaaaatcaagcccagagatcttaagtgacctcttagtgacctctccactggcccagtataataataacaacagtggtagatgaagtgaggtcatatgtgccagtgggtaggatggaagtacatctagagctgtatttccagctttgaccattcatttactacctaaatgatttttgcaatgtcagtatgctcttgttatttacttattttctttaaattatgtcttttttcacttaaaaataaatttatccttatactaagtaataatattcatgaaatcatgtttgataaaacagttatgtgtttatttccagcaaatattaaatcataaacttaacttaaaatttaaaatatctctttgtgagccacctaaaatcaatcagtatacccgtgtactcatggtgttatgtatatagcattttgggaaatattgtctcagaacagggggcagcaaattttggctggctgcctgtttgtataaacaaagttttattggaacacagccaggtccatttatttttatattgttttggctgtttttgtgctataaaggcaggttaagtagtttctacagtgaatatatgtcttacaaaactgaaaaatatttagtatatggctctttacagaaaagtttgtcaatccctgggttagaggaacactccccagttgggttttgtccatttccgttactgccctctggttctcattcatgatacaaatttccctctccttgaagtctctttcatgagaagcaactattctaccttctgtgaagaccagactagagaaaacctacttaagcataggctgaatccacagagtctaatgaaggtctattgacagatctccaccaaatgtctgttgtcttgaaagggatacacttcagtttgctgcagagactagctatctcattattccccaacccactggactgaacattccagcattttttttctctcccgtcttcaaaatggagtgacataagataagatttcaagcttgaaaactgactttgagtaagaattcaacattgatgtggctgtcacctctagctctgatatctatattcctaagtgcgggcagcttctgtttaaggtaaagttgaacattgttaagcagaaaagcaattttcatcaggtaaaataaggggaaaaatttgtaaatctgtgtcaccttacattacactgtctggcttttttttcagtcatttcttgtgagagagaataaaagtcctcatataaaagaaagtgaaattttataattttgaggaaacaagagaaacagctctgtgtatatgtattagctattgctggctctggaaatatgtttttatcactcttattactataactgtagataatcaggatataaaattaaaatttgtaatatatatccagttaatgagataagaaagtatcacaactaaacatttttagtatatttcttcaagatgtttgtggactgactaaccaaattatgaacaaactattgaggcattatagagaagataacgattcattgatattgatgcgtgtgtatatatttaaggtggggaaggattggaaaaatgttcatagaggaaattttatttcggtcctcaaggatgagtaggagttttctaggtagaaaagcaggtggaagacatttcatgaaaaaggatttgttcttctcttacaagagtcagtggtaggatgttataaaaagcactagctgcatcttcattgtccatatcaattttgaccttgacaagcctttaagaatgtttcgaggtcattttctgggtctgtttggtgggtcttttgcaaataagtcacttattctcaggaaaaaaatgcttcctttttcttggttaaagaatatatatcccctagtttttgatgctttgtcttgactcactaaaccaaatgacttctgtaacttggtctgtgatagagcagtggaggttcaggtctgagaaaggaagcaagacctaggctttggccatactgttacagaaagattttgttccctgggtggcagctaagaaacctccctgacatatctgcacatcacaccatgatacgatattttcctgacttctctatggtttgggccctccctgccaattctccatttgcctctgcagcagcaatggaatcagtcagcggatgttgatattatctttctgcatctgcaagtgtcccacagggctaagatcccatgtttcctacagttcagcatttatccttctcttgggaaatagcatttgtcctgatggggaaaagcaggtgcataagcttctataccagggactctgtacccaagaacagagagatttgtagggccctttgccaatgcaggctatcagagcagcttatggtctgccagtcttgacaattccatggagcagagcaagggctttgtcatgatatcacaaaccaaaggggaacagtagaataggatcaaaggcagaagggtggctttcataatctaaccagaggatatgaagtgacaggttctagttaaatttggcagagacatatgttgtgggatctcatggagaagcctttggttgtgtagcctgtacttcagggggtggcgtgggatagacgctccagcttttccagtatcagtgtcatctggaggagggctgaagtgactcatccaggaaagcctcatggcaggctgggaataaaagggaaagaggctggcagtagtctaccaggcctcctacttgtcctgagtttttgcatcataatgaggtccaaatgctctttacatcttctatgaacccctttggagtttatagaatcattgcatgtagaagtggaagggatctttgagtttatctgcttcaacactttcatttcaagatgaacactgaggccaaaggagggcaactgaatggtctgagaatagccaaaatgccccactctccagtttcctccctcctctctcttcctcctgtctttccttcctcctctctcttcctcctgtctttccttcccttccttctgcatatatttattaaatatctactatgttccagtattcttctaggcaattaagacatgtcagtgaatcaaatagtgaaagattcctgtcttcatggatcctattaggagacagacactaaccaacatacatgacagataagttacacaatgtgatagaatgtgataagtactatggaaaagaattcagagtgggatccctgtgggtgaaggaaggggaaaatgcagttttaaatatggtggtcagggcaggatttattgaaaaggtgatatttgagcaaaggcttgaaggcaatgagagtctgctgtgtgggtgtctggaggaagaatagtctaggtagagagaacagctggtgcaaaggtcctgaggtgggagtatgtctagtgtgcttgaggaatgacaaacaggttagagagaatggagtggagcaaatgaagagtggaaagtaggaaatgagataagagaagtagcaagttggtaattactttctaaataattgtaaaggaatttgggcttttattctgattaaggtagaaaatcattggaggattttgagctagggatagtaagatttgatttacatttacaaagaaaaatcctgtgtgccatttgagcatacactgtaagagggcaagggaggaagcagggagcccagttatggttctttgttcagagctcagacaaagaaatggaaaaacattccaggtatgtttttcaggtaaagccagcattgtttgcttatagattttgtgataggagagaaagagaaaaatcatggagaactcctgagtgtttggcttgaatgatagaaaagatggagagatcaactgagatggttaagtcttggatgcagaaggtttaagaaggaaaatcagtttaactttggacatgctgaatttaagatgcctgttggatactcaggtggggataaataggtggctggttgttgaagtctgaaatttaggagaaaatttgggctgaagatatacatttgaaagtagccattgtatatatgatatttaaatctgtaagactaaaaattttgtctgaataatgtctgtaaataaagaagacatgaccaaggactcagctctgggcacctcaacattatgaggtcaaaaaaaggagaaaccagaagaaggtacactaagaagacactctcacagaggtaggagaaaagccagcagaatgtggtgtcctgaaacccaagtgaagacagtgcaattaaggagggagtgaggaactgtgttaagatctgctgattgaccaaggaaggtgtggactggaaactgaaaaatttgatttagctatacacagtagatcttcttaagagcagtattggaacagtggtggagaaagctaagttgggttgtatttctgtgagaatgggagaaaaaattgtagattgtgtgtatatatgtaataccttaaaaggggtttgctgcaaagaaatgaaagaaatggaatggcaactagaggaaaagtgaaaacttctagagaggtttttgttttttgtttttttgtttttttcttagatgggagaaacaacatgtttgtaagctgatggggatgatttagtagagggtgagagaagaaacaattgctagaaagatatccttcagtggaccagaggagatgatcaagtacaaaaagactgtctttagataggagtatggttaattcatgtgttagcaggtgcaaaaatggaatatgtggccttgaagatagtaggtgggtggaagagacagtagagtccaccaaacttcttttgtattatttaaaatttctccacaaaaaacatgagagtaagaatgtgggagggattttggaggtttgaggagagaaggtgtaagaaagtcttttgaaagaatgggaaaatgaaataaatggactagaaaagtatagtgatcaaccccccctccctccctcccccttcccttccctcccgcttcccttcccttcccttcccttcccttccccttccttccttccttccttccttccttccttccttccttccttccttccttccttccttccttccattctgttcgcccttgcatgtctacaacacaccaaacactgtgctcaatttgcttatctatttttgttatctgtaagtggagggacaacattttttcttattaaaactctgtgggagagacatcctggtactaagtcaccatcatgaatgaataagccaggcatcaagcccatccacagtctccaaggctgtttctggcaggtgacgaaggatggttcaaaatgggcaatcatagtgccactgaaagttttctgcaggaggatagaaatccaaaatccagtagtgaaactgagtttgccttactcccacacacaagttctcaaatttcatcattcaaggagactgttctcatgagcctattgactacaaatttgatttaggttatttctcagaactagatttaaaacatttttttttaataatatagtgttttcaggatatgtcctagcctaggcagctcatcatttgaataagctaaaagattatcattcaatatttttttcaaggactctcaacatctcatagatgcttggaaaatgtaatatggattggggattgtctttattcatgggacctaagacagagaaatatataatataatttatagattgctgtaattacaagtggaaaactgaaaacttcataggaaagggaatggctaggtattccattctaaacagctttatatattttctaaaaattctgagggttatttccaacagtttaaggttggttgtttttaatctttcccagcacatcactgtgacccttattttcattctcttggcctctcccttaactgctcccttagtgtattcaaattgtttccttgattaagaggtctaaagttgctcacaatatttcaagctggctgaaggttgatacatagctctagctagaacgaaatgcattttagaggttcaaataggaattacttatatttctaagggaaattgttttttaaaggttagctaagaacacatttataatagagatggtgccataacagcagcatcccatttgccagcaacccacagagctgcttgtggttatgtgcactgttgaatgtgcactgttttcaagtgtggattccaccacatactcactgcccattcaacactgcatcatgacaaattggtgtggctcctctcttgctttgctgttggtcacttgtagaattccatggcacagtctgtttgatgggacaaggctccctcactatgggtccatcagaagagtggatgtggaacaagtaagaaaccctttgatgcccaccccaaatgacactatccttaacatacaccattcatggttgtgtgtaggtgttacactttactgaagagttgaagggaaaatgttaagctgtaggctaaacttgactttttgcaatgaccaaggaagaaacaaaaagaattagcccctttgaaggtcctctggcagaatatcttctagttcccaatattacccctctgcctttcctcatgtctctccctgtcacacagctgattgtgttttgttgttgttgttgctgttgttttttaatataaggattgtgattctctgcccaacttgtagaaaatcccactccttacatttggggctccaaaattcttggcctatatataaagtcccttaattctccctgaaatcatcttctttcaaggagtttgagaccagcctcaagcgatcctccagcctcagtctctcaaagtgagaggggcaacatagtgagacccctgcctctaccaaaaataaaaaataaaaaacttagctgaggatggtggtgtgtgctcatgtgtctacttaggaggctgaggtgggaggattgctttagcccaggcagtcaaggctgcaatgagtcttgattgtgccactgcaccctggcatgggtgacagagtaagaccctgtctcaaaaaaatcaaaaaccaaaaccaaaaatcagccaagacccagtggcctcagcaagattggaatccatagaagcggagaaaaatgaagcaggagctgttttataaaggcactgtgcagtgggttggatgtaataccattggcaacagcggtagtaataataataattataattataatgatgacaataattataacattagctaaatttgctagagaaccatctatgtgccaagaactttataaaaactatctatttgattttgagaaacatcgagcaatgtaggcattattatccttgtatttttagatgtcaaagctgtgattaagagagattaaataatttcaccaagatgagacacctattaagaatagaactgggatttgaaccaaaatagacatgacacacatgtctgtgctcactccacagcatctgtgtcctccctaggaaactttcagtggtcactgagcacctcagatacctccttgggaagacaaaggatttggaagtttgaggtgccaggtattctccaggctgaaataattgaaatagtaggatattcttgataactcttcttataatgcgtgatctagaaagcaagaattatgttaaaatatagaaggtgagtgaatacttatttcactgggaagaagagctttcttcctgagcatttaaatttccctgtaaagtcatccctcggtatgcataggagattggttccaggacctccagggtaccaaaatctacagatgttcaagtcccttgtataaaatgatgctgtatttgcatatggcctatgcacatcctcccatatgctttcagtatcttgattacttacaatacctgatgcaaggtaaatgctatgtaaatgattatcatactgtatttttaaaattgtgtattatttttattgttgtttttttttatttattgagaatttctgatctgtggttggttggccttgtggatacaaagggccagttgcactgtggtgccttgtatcttacagacacatcccttaacatttttgcttgaatgggatgaggtgagtttactgccatttcatttttatttctggagaaccccaaacaactgcactacctatttgcaaatgatcattcaggaaaagtatgttaaacctgggtttatgcatacactatctattttctatttattttgcttcaagcactacttatggatttacctgtatcataattacctcttgtaaagtgaattttaaagtattcattttcgttaaaaatttgcatgcacatgacttaagagtcaagtagtgttacaaagtttgatatgaaaaacagtaggcttcattttactcccatttcttcctcctaagaggcaaccattttcatctttctaagtgaatactttagatatttaccatcatatctctaaaaaacatgcttctgttaggcattatctattggcttcataacttgggaggatttaattccctcaattttcatatacctctccatcttatcaccacactttcccttatcctgtacatgaatatagttatatcagttagagcaatactcagtgtttacactatgacaatgtaaataatttatgattgagtcacatagtgtactaggataacttttttgcactgttttttgtttttcatagtgaaattatcctttatttgtttaatttcctatgcacctttctctaagtgaagccaaaaagttccaccagctgtccaaatcacctcttggtacattcagatgcatcaggcacttatactgatgacatttccttgaagaaatctatcctgagtctgtcttacttgctccattgtgggctggtgggtgccaggtccttttgtgttaggtgccagctgctattctgaaatgatcctcctcatcaccttgaggattcttgtgttgtctcctctgtttcctaaactgcaagtcgttttctttttggtttactttttgttttaatggaacacatccacctgtaaatgcctgagaatggttgcatgacaggtaaactatagctttagagatacatgtttaagtagttaaactataaagtaagacaaggaagtttaggacagtggttaccttgtggggcagatagttttttgagatttggtggggggtacaatggaagcttctaaagatggcatcttctaaagatggcaatgtccttttatccccctaacctggttggtggttacatagatgttccctgcttgataaatcattcagctatacattttgttttctgcactattttttatgagtgatagagttgatcataaaaaaggtaaacataaaagaaagggtttaaatcaacacttgatatctagtaaacctttaataaaggttaatggtttaatagttaatggttaattagtaatattagctattactattattgtaaagtcacagtttcaaccaatggagattttcctactcaaggaacatttagcaacgtcttgagatatttttggttgtttcaattggggaacagtgctactgacagctattgaattcaggccaaggatcttgcaatgcatcctgcagtgtacagcacagctccccacagcaaaaaattatctggcctcaaatgtcaatagtgctgaggttgaaaaaccttatattgtaaagcatttcatgtggtatgtaatgcccagatctcaatgaatgttcatcccctacccagccacaaacttcattcttttcttatatctgtttacagctttcttgtcatttacatcactgcttcaatgtgataacaatgcatagcttcttattcattcagtcaaatattggataaactttaactggtgaaaataatggaatgcctaggattttctcttaaatcgcttggtgagggtaatgtcctatttgctggcaatgagcccttctccagagagtcacttagatatgttaggcatatgctacatccgcctccttttcttctcaatgatgagtcatttcttgtcttcatgaagcgtttgtcttgtaaattcaactatttcatcacagtctggtccctcaggcagcagtggcaaatggtcagtggatattatttgcatcgtctttgcttaagctccaggaacttggaccaatgggtgcaattcaagggccaccggcacattgagcattctttttctggacatatctaaagatctgttgtgctagagtgactggctttctccagccacaatgatcagattactagattaagataatctcaaataataataattacaaaaattagactagattacagataatccaaaactaatgtgtcattgttctgcccagttaggaaacaaccttgaaaaaggaagaaactaagtttatacttacctatggcatatcaatttaatggaacaagtgcgagtcaatgattaacttagttgctcaatcaagctttatttgccttcaaaatataagtagaatagtacatttgaaccttttaagtcaaacaattttcttgtaagttgtttcatcccttctctaaaccactctgccccccaaaacacgcttgttaaatgttggaattccagaaggtaaactagatacgacttaacaactcaaaccatcagtttggacctatttctgttatcacaagattttgtgctttttcttcatgggcctcaggcaacaactctctcctggaggatttcccttgatctgcagcatcctgttagaagcaatccctgggtacaaattttaaacatctattaacgagagattttgattattttagtttgtttcttttgtgccaggataaataaaacttctctttctctgtaatattatatttgatcattgttcaagacagttattcatggtacaattaaaatagcaaagattttggcttagttggatctgaactctgccacttactgattgtgtgggaaaattcccttaacctcactgtgcctaaatttcctcatccgtaaaaggaacaggtacttgtcatggtctgaacagctatgaaaatggggagggggatttcatgggattttagatgggcaatttcacctagaaaggaatgtggatgagatcagcaattataaacatcactaaatagctagggactagaaatcatttcctgaggaagatctgaagacttaaaatttagtttggccgactataaaaagagaaaaaaggaagagaaagcaacttttcaagtatctatatgcccaacatatggtaggttacatttacacattttcaccttgtttcatccttacaatcatcctacaaggtaggtattagtttgctccgttttcagttaatccatagacttgccagagagttatgccatggcctaggcccctaggccccaaagatgagctggacacaacagatccttgctgtggatgtcagaagagagagggagagagagagaggaagggagagggagagagaggcagggagagaaagagagagagaaagagagaaaaccaacttagcaaaaggagcagaattggagagttcctgaagaggacgtgatggcacttcagagttacaaggatgtggacactcttgatgcaggaaaattggttagtcaagcaagaggaagacagtaaatcctagagagaaacttgggaggaagggagggagagagaagggagatatagaggtagttgggggttgggagaggggagagaaagagagaaagagacagagagaggctatgtggctcatgagacgcttggggagagagagtattgtgtctccatggctgactgaggtcctattaattctgcatttctgagttaagtgtatccctaccagacatgtgctgattcaaagatgagatattgggaggctgagacaggctacagtgaactatgatgatgccactgcatatagcctaggtgacaacgcaagatccagtttctaaaaaaaataaaaataaaaaggccaggcacggtggcttacatctgtaatcccagcactttgggaggctgaggcaggcggatcacttgagctcaggagttggagaccagcctggccaacatggtggaaccccatctctactaaaaatacaaaaattaacagggcatggtggcctatgcctgtaatcccaattacttgggaggctgaggcaggaccatggtttgaacctgggaggcagaggttgtagtgggcaactcttcaccacaaaattgcaccactgcactccagcttaggcaacagagtgagactctgtgtcaaaaaaaaaaaagaaacatttagattgttgggttgttgtactctggggttgtagttaacattataatattacaaacaaacaaatacacaatccccagcaagcctctcctgattgttgactgacagcaagacactgtgcttatagactacatggatataaaggataaacttaagatttgtcggccgggcgcggtggctcacgcctgaaatcccagcactttgggaggcctaggcaggcagatcacgagttcaggagatcgagaccatcctggctaacacggtgaaaccccgtctctactaaaaatacaaaaaattagccaggcatggtggcgggcacctgtagtcccagctactcaggaggctgaggcaggagaatggcgtgaactcgggaggcggagcttgcagtgagccgagattgcgccactgcactccagcgtggagacagagcgagactccatctcaaaaaaaaagatttgtcctggggcttctatctgcatactttcccacagcttgctcctaaattccaggctttgccaggccagtgagaatgagtgatggtggggttcctaattctgtgaagctacacactgtattcaggcctgtattagtcagggttctctagacggacagaactaataggatagatgtatatatgaaagggagtttattaaggagaattgactcacatggtcacaaggtaaagtcccacagtaggccatctgcaagttaaggaggaaggaagccagttgtgggtcagtccaagtcccaaaatctcaaaagtagggaagctgacactgcagccttccgtctgtggtcaaaggcctgaggacccctggcaaaccactggtgtttaagtcccagagtccaaaagctgaagaacttggagtctgatgttggagggcagaaagcatccagcatgggagaaagatgaaggcgggaagacttagcaagtctgctctttccaactctttctgcctgctttattctagccatgttggcagctgattagatggtgcccacccagattgagggtgggtctgcctctcccactccactgactcaaatgttaatctccttgggcaaactctcacagacacacccaggaacaatacttggcatccttcaatccaattaagttgacactcaatattaaccattacagggcccaaagcagagggttattaatacctgatcaaccctctccaagcccctacatgttaattgtctactctgctcctttcccttaatgccaggccagttcaacaaaatattttaacaacaaaacaattcccagtggttgtagccatcactgtggaatttctccccacccttaccccttaccatttgcttgttcttaattttctttagttctggatcttcatactctgatatctcggttctgtaacaatgaacttgacctcactcctggtcttcagagcaagaactttgtagctggactctctagtgttaaaattttgtcttcagaattttcctaacacccctgtggttcatcatgctgcctgaagtccccttggcagcatctggaccattcatagttccttacaagaggaagggagaactcacatatcctcttgaggtatatttttaacatctgcaagtagtggtggggcaagtagctactgaatagggcagcctgtacattgagtccctttcttgaatgcactgagatagaagtgagaggacagaatttaaatgaagtaagaatcctggggttcttgatagctagtgaattccccccggtcactggagacctcaacaggatacagaagataagactggcaaataagaggtttatcttgatgccccaaataacttaggtgaatggcaggaatgccatcattctgataaactgattgattgcttggttcagtcattaattcttttgtttatcacacatttattaaatacctaccatgtgcctggaacccagattaacaacaaatctcttttgcatccatgaaattcttcagcctttcttttttcaaaactaagcattgtatactgtggccagatgtgaggccaagggtatgaacaggaaggccccattttcacactgtgctagtggctgagaaattaccaggataattagatttgccttcatttcttaacagctagttgcacggtgcaatctgagctcttgtggaggtagcataagcactttagaggacagttcatgtggaaagagttctctgctgaaaagataagacagtcacagagcagggagtatatcccttggcttggccagtgtctgagtcattctctatattcagaaactacagaaaagtctaaaacagaatttcacatggtttgtaatctaactttacagatataatcttgtatacaaaatgagactttataaacacatatatacagcatttctgtcaggcttttcccactaacattatatcttgaaaacttttccacatcattaaataagtttagaatataattttagtggctaaatacattccattatttgggtgtgcctttatttaaccatttttattgatttcaattttttctttattataagtattgtctcatgaataatctttgcacctctgattgttcttttagatagactttttagttaaaatactgggtttagggcttttaactttttaaagcttttggttcctactacaaaagtttttgtttttcaggccgaaagtaccaaaatgcaccccatcagtgatgtatgcaagtaactggcaaactgtacactctccaatattgtatattatttaacaaattttctattattgaaatagttactgaattatctattgaagattaagaagagcttcttgctaaatttgaacgtttattacccctttctgaattattagcctgagaagtttgaagagagtgaatcaggtgtccagaaagccatcattactttctgtgttctctgatgtgactttgaattgctgccaagagacattatcaatgattcctgttcttcgctctcaccccctcaaaactcttgacttgatgacatgctgatttttctcttctccttctggtttataaagaagtcagaatgtacttggggatatgatatgacttggatctgctgattgggatctgggaagggaaaggttactcagactttcttatctacacagcattttgaccctgacttaaaattgacctcatgaagacagtcccaacttcagtttggtgatacctacagatgacttcagttatattcaggggtgtcatgagatttttttcagaggcagttacatataatttaatttgaaaattaattcaaataaatcttttaagaggagaagagaatatgaaattcatgaagtaagatttctcagctccctgaagattggcaaagacttctttaatggcaaaggatgcttttctatgctgggtgattttacactgtcaggctgaggacagtgaagtaagtttgactgaaatgggaccacagctgtgattatctgtttactgagatactctagaagtttggggaacagaactaattctggaagctagaaaaggtgcagcttgaatatataatgttgtgtccaaataatatggcaacaaacacaaatataataatactgggtggtctgagtggtgggtttcacccagaaataatggagatatcctaacaggtaggcataacacagtgtgaaaacagatgactgttgtgatcttaccaaggtgattgtaattttagggaagtctttcataagattttatgtgtctagacattgtgaatataggaccacagctctagttcctttctacatggaaataataaggtagttgaaaaatttacagagattggaatcctaggcaggctaaggaggagaaggccagttacacagatcagggcatgaggttgccacttcatttagaaaagatgagttctgaaaataagatgtgtaagcggccaacaaacatatgaaaacgtgctcaacatttgcatcagagagatgcaaatcaaatgagacaccacctcacaacagtcagaatggctattattaaaggtcaaaaaataattgatgaggttatagagaaaaggggatgctcatacactattggtgggaatgcaaatttgcttagcccttgtggaaagccactggagatttctcaaaaaactaaaaatagaactgccattcaacccagaagtcctattactgggtgtatacccaaaggaaaatagattgttctaccaaaaagacacatgcatttatatgttcattgcagtactatcataataaaaacatcagggaatcaacctaggtgcccatttatggtggattgaataaagaaaatatggtacatatacatcatgaagtactacacagccataaaaaagaatgagatcatgttctttgcagcaacatggatataactggaggccatcattctaagcaaattagtgcagaaatggaaaaccaaatacttcaggttctgacttacaagtgggaggtaaacactgggtactcatagacataaagatggcaacaatagatactggggaccactaaagcaggaagggaaagaggggggcaagggttgaaaaactgttgggtagtatgttcactacctgggtgatgtgaacaatcgtacctcaaacctcagcatcccacagtatacccatgtaacgaacctgcacatgtacttcctgaatctaaaataaaagttgaaattacatatatattaaaaaaggaaaagatgagttctataacagagttcatggccagagctgctttaaaacccaggtaacaaagttgggtaatggaatgatgggtaagagctctcatagataatgggtgagagctctagataatctcccagttcagaactggtttggccctaggacaagctggcaactggggaaccaaaagggccctgctgtggggtgaagcagttgtacttggattgggacaaggcaggcctgacactagaccaggaagacagcacagataatgcaatttatggttttgtccctgtttggtatcagcacagcatcctatattttgaatgtatagactaaattatgacaatttttcattcatcccttttactttcccttttctcatctatttttcagaagccaatcatcaacctcctattgaggaggaagaaatgagaggcctgagaaggaaagtgcatcaaactccccttactaacatcatacctgtcaggaaggaagcagatgagggctgtggggagagcccatccatcttttgtccacgtgggtgttcttaaaaaagtgatttatgatgccagagcagtcttccgtcatagcacacttagcatttactatgttcataacaagttagaaaagttttgtgcaagcagagcttggggaaaacaactctgagtttaagaaattcagtttaagaaacatggaaacatacttttcactctaccctggtcaaaacctgtctactctttaaagcacatgtaatatcatgcagtgaacagatcatggaccttggggaccaaacagacctgggcttgaattctagtttcactgcttgttagctgaaactgatcctgtttccccattcatatcatatctaccttacctgattctgggattgttttgcattagtttgtataattctattggaaactctttgtagagagaaagtattacacaaataaaaatggttactgagtgaaaagaaccatcgaaataatgaatcatccgttctccaagctaatcttccacctccaactctaacactggctaaaatctggagagaaactgggaaatgctttagggttccaaatcaccagaactaagtcaaagtcaactaaaagtgccattcacagacatcttacatgcagtcatatgccaggaagggaagaattagcaggaggaggcttgcacccaatctttctctttattggtgcaatgctccagaaaagaaagaagacaagagacccagtcaaatatcctggttaatatgctaagtgtggacttcttggaaaataagctcagtccttgtcaatagaaagcttttagcaggattctagaattctcatcataaacctggatccacagatttatggatcttggctccctggaaagtggtaggtaagcttgtcactatctaagcatagatgacttgttctataagtgatgtaaattgtgcacattgcttagagactcataggtaaatctgagccttgagtgttagcctgatgtggcaagaaaagactttgagggcagcattgaaggtaccaggcctttccttgctttgcctgtgcttcatgattatgtacatctttgatatcattagttaagcttgactgatactgagtaagacctctgattcatgttagtctgattttaccacgtgatcctctgtgttatctcatataccttccttaaaaatgtgttgaagtcctcaaaacggcaattacttgctcattattccttggagagagcacatgttttcatgggcactaatacagctgtatcctggacatggcttaatgacacagtgggaacacctgcctccctacatctaatgatacagagaaagaactgacggaaggagtgaagtccaattcttttctcagccctttctctacacttgactccttctccactaccctccgaggaccatatccaccaggtctttctcaccagatgctctgtctcagtttattacttcattaggcttcattagcattcattgagactaataaaacacactacacatccacagtttgttatctaatcctcaccactcacatgcatgtaagcatcagtgtaaagtttcatgcattggtagaagtgttgtcttaagagtttttcatccacaaacatttaacttcctgctgtatcctgactggggagaaatgcattcctaaaacctttggcaaatgggcctgttatattttgtactgttctgcttctataaatttattctattataggtgtcctttgtattaaaaaattggtttgagagcaaaggaaaaaatgtttctgcatgtgaagaatgccatcttattcctattttttagaagtatgtattgaaagctttggaaggggaagagtcctactgaggataactgtacgtccctttcattagtctcattgtgccccttggaaagacagtagtaagcaatgtggtgggatggtaaaactttaagtgagacagtttgttaggtgagaggccctctcttttatacataggaactatatgagcttgagccatcttttctccaccctgagcctcatttgtcttatgtataaaattgaaataaatgcatacatcaaaaggttattgagaaaatgtgttggtgaatgtgaaaacattttgtaaactataaagcactacaaaaaaatatttgatatttcaagtaaaaagggcttgattattttctggggtttgtgagttgtccatcttacccctgcccccacccctgatcagcagctccataaacatttaatgtgggaagttaggctctatcaggctcttggcagaccatctgctaagtgaatcctgagatctgttcaaaacagagcagaaattcaagggaccaagatacatatccacaggcatgcatacacatagatatgcatacaattgtatacatatatgcacatatacacagacatcccttcccccaaatctcagagctatgcttttttttcaaccatgtagtgaaaaagaaaaaaagctggttgtttctcccacagctatttataacaccacctgggaaagcagttttggtaccttacaagctggtgtctaaatgttgacttaggagttaatgatgactggtaagtccaaagggagaggagaaccaggacaaccccacagaaagggtcatctgggagtagaaatcagggataggacttcagatggcaaggctctgctgtcatctttgtgcagactttctgatcccttagctctgatcccacctctgtaactttatgctattatcttatgaggatggttgagaagagtgaggtcccatcactgagtttttatgatgttccatttattccaatagaggcaggagtcagagaagcagaatagactcagccagctcgctggtggtccaggaaattggaatcaaggtattatgtgtataaggccctgactgggatatttatcagtttagatctgtatagtttaaaccaagtatgtatatctagaagtagttctaaaattagacttttcagcaggcaaatattgggtcttgtctaaaataggacctgggaacactagatgttgaattatggctgctcttcagctcaatttccagacgtttggtacaatggaatcagacagactttgattcaaacccacaaactagttttctttcttttttttttttattatactttaagttctagggtacatgtgcataatgtgcaggtttgttacatgtgtatacatgggccatgttggtgtgctgcacccattaactcatcatttacattaggtatatctcctaatgctatccttcccccctccacccaccccatgacaggccccagtgtctgatgttccccttctgtttccaagtgttctcattgttcaattcccacctataagtgagaacatgtggtgtttggttttttgttcctgcgatagtttgctgagaatgatggtttctagtttcatccatgtccctacaaaggacatgaactcatccttttttatggcttcatagtgttccatggtgtatatgtgcctcattttcttaatccagtctatcactgatggacatttgagttggacatacaaactagttttcacagccaacatggttaagacctcggcagtttctccacctataaaatgttgataataataaccatttgggatcttgtagaataaagggagaaaacatttaacagttgcctgagatgaagtaggtactcactaaatgataattcttctccatgtcttccttcccacttcaggcttcccttggtgaattttccctggacaactccctccatccaaaactactatttaggtttagagtgtttcaaagtcacttggatatgtatgcaattgtcttcaagctaatagagataataatagtacctaacagtagctatctcatgggttcattataaaggatggatgatataatacaagcaaaacagcacagaacttggcaagtagcaagtgggtacaggctagctaagatctattacttgtctaatgagtagagaagacaggaaaaaaacagtccttgagccccgagtcgattctattcttcattgttcccatagtgacacaccacaagtcagaaatcctgagtttcaaaaagtcttcaaaatattgtccctattcccagtgacctgacactacagttcaagtcaactagaaccctgtctgttttcacctgtattgttaggcctctctcagttagatttgttaagactattccccagaagtaggctgcaatgtttctggaaattctacacagggcttattctgttttgctgggcttggggagtaaggatgaagacggggctgatggtgaaacaggaaaggggtgggatacagattaggtggtggaatctggaaatcctccattttacagaggaagaaacatgtcctaattttatccttttcttgctctagcttcagatcatgatgcaaagccaaacacacctcccccaacacacctacagcaatctaaggacaacacccggttccaaattacagctctgtgtgccaatttttcatactctgttttctttagatactggtataattgagactcagtttttttttaaattgcaagagaacagagaaaaacagtaacattgataaagaggttaaaaaaattcctactcagaaatgcatatttgcagcataagaaacatgcagctattttcaggtatgtgtagtactgctccattaaactgtagaatttttttaatgcttctctttctgataattccctgaatcacaatgtgtagagaatggaagtatgttatatgaatagtgaaacaaatttctctctgtttttcttttagcacaacaggaagaaaaattaccattttaaaatgcagaaaattgaatgtagccacttttgcaggctaaggaggattttattttacatcaaaggaggtggagaattaggactctatcttgatgctctctttgagggtaaaaattgagctccctttctcccagggcaccatctcaaaagtgaggatggtagataggaaacagcagggttcttctgcataataaacctgatacattgaaggacattctgaatttctaaggactgcctaggaagtgattgggtatgtgagaggcaagggagctagaagaagagagacaggtgagaggatgctacagagaactaactagaggcccctaagctggcagggagccagtgcctaaccagggaacacagccaacaagagactgtgagagagaagaatgcacttcagagcaaaaacatcttactttccaacattaagagggtttcttaaattattgtggtccccatcctgttgctttgaaccccaagtaatgtttggttacacagacactgtgctttgtgggaagaataagagtgaattcccaaagggctaatgatgtgcaggaagaactccagttacaggggaagcggcaaagtggagattgaggactcagtagaagctggaaacttgatcataaaatgagattaccatgggacaggttaaactctgtaacaaccctcagaaacatttgcaagggacactgaggagaggagcagtgtgggtgctgaactttccaaggaaaggatagaggctctggcagttctgtttgaaaatttgtggacacataattcccagaaggtcccccagaggcagctgctgtgtgtgtgtgtgtgtgtgtgtgtgtgtgtgtgtagggtagaatacttgggtaaggcaattaacaaatgctgacaccttttccatacttatcacttcacacttgagagagctattttgtataagccacaagtctgaaagagagtctcaaagccttgatgtgtgcttcttgaccgctgtagggggagaaaggtgtgatactttccctcatccatcacagccaacactcctataacaaaaggcatgttgacaaaagaagagcataacaaatttatttactctaagttttatatgacatgggacccttcagcaatgaacactcaaagacccagggaagactgtctatgtttatgctcaggttcagtgaagaatggggagccatggaaacatgtgattggacaaagggacatgatctaatggtaacagactgaagagggaaacacagcaagacctgtctcttcagattcttcttggcctttctctgtagcattttaccccctcccccagcctccccgccatgaggcaggatctctctggaataaggttcttcaaggcagaaggtagagaatgacccttctaggttttatgtatgggttgctttggggaagaggtcttctaatttctattacccatcttgtggaagaggaattctggtttctatggctcattttggggaagaaagaggggtgggagacaggagggcaggagaaggtcagagagactttctcagtatgtcaaggtgccatatttttgtgtatcatattctgagccccaacacagtaaactatcccatgttgctacattagatgcaatctaaatgagcaacgcagatatgacaggtcaggggtaaaataattttgtagataaacttataatccttttataaaagagggtcaattacattcttcttttcattctgcaactgtgctatagattcctttgcagggctgctgtgtagactcacgcttttttgtgtactgcaagacgacacctggtcaaagccaggaatgagaggctgacatcagccttcagtcagctcagatgttgcgtgtctgtcagctaatgggggaccagaaggttgaaggtaaaaatgcatgagcttattgtcatttttctttttattttacttcttttgtgtctttttgcaaatcttcagtgctctttgcacatgtcttccgaatattcttattgactagtcaaatctttaaactcaattattctgtcatcactaaggtgacatttttcaatctcaaattctaaaaaaagatactatgaaacactagacgatgtatccaattggcaagttcttgtgtttttcttaagggaaataaagctattattctatgggaggcttggaaaatgaaaattttctaataagaactcctatcatatctattgtttgcactacttatcacaggcagatttactttagaattatatatattgcaacttgatcttcccagctaggtgagaaggagccatgctttatttacactgtaaggttgggaggacaaagagatttcaccttgatacaattggtagtggctgcctagagcagtatgttgagaaaaatggtgaggttgtgttcgagttggctcagtaagggactgccacaatcaattaatgatgcctgctgtgggaatgaaagagtggaggatgcatgtattatctggtcctattgtaggtactttttataggatcaacagaataggtagtcaatagaactttatttcatttcataaataaaatccataactatcaaaagagttctagaattatcacactaccccatcttctctctgtagaggacaaggaaaagtatatacccaagaccatattaccattcaaaccatgacattcttgatagtcatagggggctgtattaataattacactgggaaagtagatgtacactggggttgttgctggtaaagaagacttgcctcagggttaacccctctaagaagccttctttcagtctacctttcaggttaggtctgtgcttccagtaatatcctattcatattttgatcatgatgcttatcatactctgttatacttaactgttttctcatctgcatctctcattaaatattccattttttgagaggatcaaagtaaaaatcagatatgaatctactgcacatagaaatacatacacaatatactatagactaaatgtttatgtcccaccaaaatttatttgttgaaaccctaacccctaatttgatgatatttggtggtggggcctttgagagatgatgaggtcatgaaggaagggcccttatgaatgaaattagtgcccttataggagagaccccagagatcttcctcacctcttctaccatgtaaggacatagcaagaagacagccatctatgaactaggaaatgggttctgtctccagacaccaaatctgctgatgctttgatttatggcattccagcctccataactatgagaaataaatttctgctgtttataagccacccagtctgtggtagtttgttatagcagcccaaacagattaagacacaataggtgctcaattaacgttaaatgaataaaattcttgttactcaaagtaaagtcacaaggccttgccctctacctatttccctcccaacttcctttctttaatataaaagagtctaaaggcagaaagggggagaatagagttactaacaagttgttcttcagtctgctaccacaacataaatgttttatttcctgaggaattttcggatactgaagcactctgcattcattgtcttgctttacttcttcactgtcccatgagagcatggcttcagtactcttgtctgcattcaacagatatgaaagctgaagactatttggttatactcaggctctacctgtatacctaaggtgatacaactacttagcagtggcaaacagtactaggatctaggtcttttggttccaaatgcagtatgcaacttgctgctgttacttagaaaacttagtaaacatcatatgagaacactttttatacctcctttggttcatcagtgttggcagactcagtaggaaatgaacttaggaagaaaaagtctgtgaaaatggtgacattcataagatgccaaagaagacagtagagggctacaggcctccatttgtaacctgcctggttatatcaattaggaaaagtcataatgaagcttctagaatcaaataataataggagacagggtcaacaggcgaagctgagatgctagaggtacatgcaaagaacaaagtcaactcttcttgctcagagcagcataggaaacaggtaacgataattttggaagattgactgccttatgaagttcagaaagttcaggtccagaagaagagtgactgtaaggaacattgtgtcagacttcagaaagactgacaacaaaaatagtccactctctcagatacagctctcatcctcctgcttcttggtgggaaccaatgcccagcagagagcagcttgaggtcttttaaatgatgatgactgctagcaactggctgaatgatgaacatggctaagggagacagctgaagctcctggcagaacattttctcagacaccccgttttcgaggaacagggagggttacagaatcaaagactcagaagaaaatatcggagttgggaggatccacagcatattaagagttagagtcatatatattgatgatggcgtcataccttatcctgtttcactgagcggtcaaatttggaaccatctcatgatcagattataaatcctccttttttactttttaaggttgctctgattgggcattggctttgctaatcctttaataaccccagtgcttcatccattcacttattcatttctctccactcatccccccatacccaaggagttccaacccagttatcagactctattgcaagcttctacccaccggattcggggtacagtgacttgctgctgttggtgcttttctttactcccatttcagtggtggtcacattgtccgtattttcttcactaatggaaggtgattatgaagttgagatatcatttgacagctcatggttggtaatgttttatttttgttttttctcatttcccactctggagccaccaatgaaatactaatgggccctgtgggaggttttcctttatttaacagctaaatgtgttcaacgatataaggtattgcaaaaaacatactcagagaaggaaaattaaaatgaataagggggaactggggtctcaggacaaggagtgagaaaactcatgaagcatcctttgtaagtctgagacaggataagagtggaggttgtaaaatctcaaacgatatggaaaatcttaatatgaattcgttcaccaaaatttcctaagaagtcggaagagccaattccaggatcactaaaaaaaaggcacgatttcatgcagcagggagtaaacatatgagatttgtaacaagaggtagtagagctgaaatactatttctctgcaaggaaatagatgcattcactggcaaagtcttccttcaaattattaggggaaccgaagggcgtttgagctaaatcactaattcagatgctgacataatggaagactatgacgaccttcaaaacacatttcttggaagtcattctgagaaactaaaatctaggttgataaattgtgtttctgaacttaacagtttattattggtgttatcaatgatgttactatttcataaaaatatttcataggctcattctaagagattccaaaaaatcgaggcagtttatttcaataaaggccctcagatgttataattctttaactgtttcatggtcaaaataacttcttttttcctctacacttgtagaacaccttgtttcaaggtagtcttgggtcagggtttcttggactcataactttgtagacattggtcattgacttctgtcattaaattttgctgtgaagattgtgaagtcagcgtctatttttcattctcatgacttgcttttttctctactaaatacctgaataaattttttttagcctcagagttcaataacttattatttcaataattctctcacaattattaatttctcctggaacattttgtgtcctttcagtatgtaattttttttatttcaaggagaatctcttctactataacttttaatactttttctgtcctatttattgcattttctatttctggaataataatatgccttatgttgggccagttttttcttctgttctttgcacctattatctttttttcttattattctgggctgtttatctttttttcactctgtgttcactgtgattaagtcttccttatatttgtaattgttttcagctgtgtctattatactccttgttccatgatgggttgttttggtccttagcttgtttccttatctttgcaatctcaattttcctctcatccaatttaaaaaaatcttttgtttgtggtcttattttactgatttcattttctgtagaaacctatagaaagatgattgcatgcagtactgttggagaattttcttccaagttagttttgttttttaaacaatttttggcatttccctctatcttctgtcttgctttctcatttggctgtagtatattctcttaatgccacactcttactcttcatcttccatgcaactctacgcagagtttccatttgttctaataatgtggactgattctccttgactcttttcttactctatcagtgacttctttgtctacattttctgagctgcttcgaggtgtgcatattgagttctaattatttaaaaaaatagcagtgggagagattttggggagttcttctggggcaatatgtgaccttagaaggacctggaacttctctttcttctgagactttgtcaaatgtcttgtcaaaacaagacatttgacaaacaaacttggtatttaacaacaaatcaggactcgttgcccttggctggagctgttttctattcttgtggtggggagacagggcagagatatcatcttactttagataagtcctccaagtcagtgtggcccttacttacatcatcctggttgtttcacattgccatttctactcacctgtctttccctcatagccatttctaatcctaccagtagaagaataaaaataaaacagtatcagaagacttcatttctcattcacagttctgaggggagaagtgagttttcctctgttctcagtgtacccacttccacaccctgaaacatgattttggggttttttttcatgctctgttaaatccctattattattggggatggttagatctgggtggttctggccactttgacttccttctttcttctctcagcctggggatgcccaagtggagagtgtgaagtgctaggaattcctcccattccttggagttgccgtggtgataggcacatgtgttgagagcatttctatgccgtcccccacattgctgactcgttgggggctcacttggggactgttagtgatagtactcacgtctgttgatttctttctttcactcagcacttattctgctaagctgcactggaattatcttcttcattccttggctcagctgccatttttaaagtttatataataatgttggttgtaggtagttcttttaactttttaataaggtatttttactgttgttattatggttatgtcttgggaagaggaaaacctatgacctgcccttttacttgccagaacacttctcttgttacaaatcattgtttttattcattttagaggtgcttctagatgggtgtttgtagcaacagtgacagtttaatgatatgttacaaaaattggattgagggaaggtaaggttgtttaacactagtgttctagatatagtcctctggggttcttcccagatgctaggaaatattctgactgaaagttcatccaggaaaacttttctacctttggggaatatccacatggaacagtaaaaatggcttaaaatcaaaagggtgtagtagaaaaaccgcaagactttcttccccctaaataggctcagcctcaattccacacacatatgtgattttggccaagttcttaaacctctttaggattcagatttcttatctgtaaaagggaatggtatcccttattatacagacttatgtggaggattaaatgagacgacatgtgcattcaaagaatccaatctagcatctaacactacttgggtgctgggaaatggtagtttctttctttgtttctccccaactgcctaccctacccccattgtcctttgtgatctgcagatatggccacctaatctgagctaatagggtagagaccactttgctcaatgaggaaatgagtctgggaacctgatagacatcttatgtttcatggatgcttttcccaccttataaaatgatctcctttaacataaagattatgaagtgagatcagatggttggcaggtggtaaactatttgctttctgatacatcccaatataaaaggttatgctttccattaaaattgaattcgtgtgaaatccaggaagtcatcaaaagtgattatatactaaactaattgttctcccagcaagagctcttgacaaggcccagtaagaatgaatacttattaataaaatgtaggtacagaaggctgaaacatttcattttagatgattgcagtaggcataatttttttgtttgcccccagccatgcatgaggaaaaggaagagtcacgcagagaactggactgacagaggcactgtaggggacgacaggggtgtgtctgaattagaactcaatacttgacttgaatgccagcttgagaagtgccccacattgtgttatggccatggttacctccactgagtgagagagatagcttgaaaagcccaaagagggatggatgagctggcatggcatgcagcttgtggctgcagagacaattagagacaagttacagcagaaacgcaactgccactccctttgtgggattatgaaattgagccaaatgtgtagaaagtgctctcactctgtgtagccgttgttgcctttcctgcaggaacgatctggaaatcttgggaagaacccactgttcataggtaataacaagccacagcaaattgacactttcattaatacaatgtgtaatgaaagatgagccatacctaattagacttctgattagccagtggatcaccagataaccccatttgctttcaaaacttgattctatacaaattatctgttttctactaaataaactaggtaatgaaggaacatacctcaaagtaataagagccatctatgaccaactcacagacaacattatactgaatgggcaaaagctggacacattccccttgaaaaccagcacaagacaaggatgccctctctcaccactcctattcaatgtaattggaagtcctagccagagccatcaggcaagagaaagaaataaaggtaatccaaataggaagagaggaagtcaaactatctctgtttgtagacaacatgattctatatctagaaaaccctttgttttctaaaataaaaataaaacagtatctgaagatttcattcccattcatagttctgaggagagaagtgagtcttcctctgttctaaatgtaccttcttccacaccctaaaggcacgtttggggttttttttttttttttttttgtcatgctctgttaaatccctattattgttggggatggttagatctggctggttctgaaaagttagcctcagcccaaaagatccttcagctgataaacaacttcaagtttcaggatgcaaaatcaatgtacaaaaattgatagcattcctgtacacaaacaacagccaagccgagagccaaaagagaaatgcaatcccattcacaattgccacaaaaataataaaatacctaggaatacagctaaccagggaggtgaaagatttctatgatgagaattataaaacactgctcaaataaatcagaaaagatacaaataaatagaaaaacatgatatgctcatggacgggaagaatcaatattattaaaatggccatactgaccaaagcaatttacagattcagtgctattcctatcaaactaccaaagacattctttacagaaccagaaaaaactattttaaaattcatatggaacaaaaaagagcccgaatacccaaggcaatcctaagcaaaaataaaaaagctggaggcatcatgttacccaacttcaaactatactacagggctacagtaaccaaaacagcatggtactagtacaaaaacaggtacatagaccaatggaacagaataaagagccaaaaaataaggccacacacttacactatctgatcttcaacaaagctgacaaaaaacaagcgacaaggaaagacttccctattgaacaaatggtgctgggataactggctagccatatgcagaaaggacccctttcttacaccatatagaaaaatcaactcaagatagattaaagacttacaggtaaaacaccaaactataaaaaccctggaagacaatctaagcaataccatcttggtcataggaacgagcaaagatttcatgacaaagacaccaaaagcaatttcaaaaaagcaaaaattgacaagttgggtctaatttaacttaaaagcttctgtacagcaaaataagctatcaatggagtaaacaggcaacctacagaatgggagaaaatatttgaaaactatgcatctgacaaaggtctaatatccagcatctataagcaactcaaatttacaagaagaaacaaacaaccccattaaaaagtgggcagaggacatgaacagacactgttcaaaagaagacatacatatggccaacaagtgtatattaaaaagctgaatatggctaattattagagaaatgcaaatcaaaaccacaatgagataccatctcacaccagtcagaatggctgctattaaaaagtcaaaaaataacagatgctgctgaggttgtggaaaaaaggaaacacttatatactgttggtgggagtgtaaattagttcaaccattgtggaaagcagtatggtgattcctcaaagagctaaaagcagaacgactgtttgacccagcaatcccattactgggcatatgcccagaagaatataaatcattctatcataaagacacatgcatgcaaatgttcattccagcactattcacaatagcaaagacatggaatcaacctaaatgcccatcaatgacagataaagaaaatgtgatacatatacaccatggaatactatgcagccataaaaagaatgaaatcatgtcttttgtgggaacattaatggagcttgaggttattacacttagcaaaataacacacaagaacagaaaacaaaatatctcatgttctcacttgtaagcgggagctaaatgatgagaactcatgaacgcaaagaaggaaacagcagatactggggtctacttgagagtggagggtgggaggagggagaggagcagaaagataactattgggtactgggcttcatacctacgtgatgaaattatctgtacaacaaacccttgtgacatgagttcacctatgtaacaaacccgaacagggttcacatgtaccctgaacctaaaatttaatttaaaaaaaaaaaaaagaaaactttgccagaaaagattgcaaagccaaaaaaacctgacctaattatatgtttcattgcttccataattatattactctgtacataataacatttgcaatgaggattttgttcttaattcactctgaagaaacactatcagcattgagattgttaaaagcaccaagctttaaaggaaaccctactgggctcagaacacacccttagaaatatttcgtccttcttaagttgtgggctcaattgtgtcctcccacaactcatatgttgaagtgctaacccctagtgagaatgtgactatatttagttataggtaattgagttaaaatgaggtatttatgctgggctgtaatccaataagattgctgttctttcttctaagaagaggaaagttggccacagacacatgcatgcagagtgaagatgatgtgaagacacagggagaagatggccatctacaaaccagggaaagagttctgaaacagattcttccctcacagtcctcaagtgggaaccaactctgctgacaccctgatttcagacttgtagcctccagaacactgaggcaatatctttccgttgtttaagccccccgagcctgcggcactctgttacagcatccctggcaagctaatacatgcactttccagtttttcctctaatactgacttctctggccttgtttcctttttcccttctttcacctcatctgtctctctagtattcattctaaactgtgcccctttcttcccatggttaggtatgaacatcaatgggagtgaaattgaaagatgagaggaaattctaatacatgaagtttctggttacttgtaattgaagtgagggataatttcagttttaataaaatgtattgctttaaatatcaacttcctgcaaatgaccacttgataatatttatattacttttatcaggaaatcaggcagctttctagggatcttatgtttggtaataatagcagagaacatcagaacaatgaggttttaaagaataaaatttttagacacactttaaaaccctactttaagaccttttcacttttaaaactaaaaactgatcatccaacactaataaggtggaagactaaattatactgttgaagaagtgggagagtaaaatttcatcagttaagtgagtatgaaatttaaaggctttaaaatgtgtctttaaaacattctctttcagctcataaatgtaaaaacaatataaagctcaatttgggttccccttaaagtcgaccctaagtcaaggatttttgttaagtgatttatctggaagttgatcccaggaagcagaagttggggacagggcagtagacccaggggtcagaaatccaatagagattttttaatgagtgggtgatcactatgtgcacaaagggctcagtctcaatgaggagcctcggagagactatctagaacacaccttagcattgtcccatgaaaggacaaggaagttggaatatttatacacaatttccatttacccttggttgagagtcactcttggtggcattgacttgcttatattttggcctgctccatgctggtggccagaggatgctgtctgacacaaatgtaggcagttatctctgtatgccaactgtccacaggtggtctcagacttgggcagaggaagcttggtgaggggtgggaagggaggataccaacagcatttgctacagttaagtaaaacccatagtcaaataatgctatacatttgaactgtccaggtatttttgaattaacactaagtgatccccaagtcacatggatttttgccttgtgaatatctgaaatcacccagttcatccatcctcactgtcaccacatgggtttaggccaccatcatttttcacccagatcactatccatccctgcctccagtcttgctcatcatcagtcaattctccacccagctgctagagggagttttctaaggtggaaatgaagtcacgccagtcctcttttaaaaatctccaatgactccttgaagtctactcttccatgacctgcctccctcctgtctcttccctctcatgattcccactggacttatgccactgagtcaacaaccaatctctgtttccatctccagactcacctcgatcttcctcaggcctctctcttccatctctctcccaaccatctctacttctggatttttatgcacacaatccttcctttgccctttccttctcccttactcccatttttctgactgcctcttactgactcttcatgtctgagcctaaatatgatctctacaggaaatttttccttttccctagaccctgttaactcccccagacttccactgccatagcagcttacaaattctctatacaatttcactatattttattagagctgtttcatgtctgccacccatgaaaatatcagtctatctgtttttggctttatatcttcagtgactaacagagtacttgacacataacaggtgctcagtgtctatttgttgagtgaaggacaatgttcaacatttatttttgattcagtgcttctatgattccccgaaggaggcattcaggaagaataaatgaacctcaaataaataaacttgctacttgtggcaattttaattagaggctgtgaattgtagtgtctgtgtactactgttccatgttttttatggatgagagagtacttagcaaacacaaatggggtttgatgtctagttgatttgatatctgtaagaagcaaaggtattatgtattgaatctcttcctacaaacctgtaatctgaaccacactcttaaatgacctgaccaatatcctttttatcctacttgtggtgactttaattgtaaaccttgctaatattggtaggaaacaacaggtgctgttttctaaggtggaaatgaagtcactccaggtgctggagaggatgtggagaaataggaacacttttacaccgttggtgggactgtaagctggttcaaccattgtggaagacagtgtggcgattcctcaaggatctagaactagaaataccatttgacccagccatcccattactgggtatatacccaaaggattataaatcatgctgctataaagacacatgcaaacgtatgtttattgtggcactattcacaatatcaaagacttggaaccaacccaaatgtccgtcaatgatagactggattaagaaaatgtggcacatatacaccatggaatactatgcagccataaaagaggatgagttcctgtcctttgtagggacatggatgaagctggaaaccattattctcagcaaactattgcagggacaaaacaccaaacaccacatgttctcactcataggtgggacttgaacaatgagaacacttggacacaggaaggagaacgtcacacaccagggcctgtcgttgggtgaggggaggggggagggatagcattaggagatatacctaatgtaaatgaggagttaatgggtgcagcacaccaacatggcccatgtatacatatgtaacaaacctgcattttgtgcacatgtaccctagaacttaaagtataataataaaaaaaaattggtagtctggggttgaatagtaaaatctctgagataataaaggcagagaggatgtttctgtggtcagtttagaaagagtcatgtttctgcctaaggcagataactttttaaattcgggacaaatctgagagctaccctttctatcctgaaagagtggaatgttaaatgttatttcactgatgcagaatagatgaaataaagtgacttccagttagagaaatataggaatggaaaactaggtcaaacagagagaagccattcccaaggcaatgagcaacagcatttggatttagcagagcatgtttgaataactgctctaaaaaatagtcaataaagcctctgcattaagaaatgtaacttcgagtggttactaatcaagagaataaaaattttctgccagtcatggtaaggcagccatgctatgaggactgttacatcacagaatgatgctgagaagaagctcattagaacccatataatgtaagaagatagcatatccaggccagaccacactgaaggaaattcacttggttatgcctacttccatgcctggaacttttgcttaggatttttgcagtttctgggaaggaggctgtcttagacaattttcctctgctattacagaagaccacaaactgagttatttttaaagaacagcaatttctttggccgacagttctggaggctggaaagtccaagatccagaggctgcatttggtgagggcttttttactgcattataacatggtggaaaggcaaagaagtatgtgagacagagagagaaatggggtcaaagtgggttagttatcccaggagagggttcctgataaaagaaactcagtcctgggataactaatccacttccataaaaattaacacctttatgaaggctccaccctcatgacctaatcacctcttaaaggccccatctcccaatactgttacattggtaattaaatttcaacatgggttttggagaggacagtcaaatcatagcagaggcaatggaactcaaacatgatactatgagtatatattctttatactgcagttagtgatatagtaaaacatatagagatctcatcttctaatgggggttcagttatactcaaataagtcttctgttattttcataaaattccagcatttaaaaaatatacataaaaactgagtgttaccaagatgttgaatcctcaaatgggcaaagccatacaagtaattcctcctctccactcgtccagaatcccaaataaacttctgtttgcatctgaaatgatgggtagaagaagagttatgccatctggaacttacgttcttattgggcagaggtagtatcttgcccaataagatggtatgtcccataccatctcagcatatatggatatacaacatatgccctgtaaatcactatgaatgtagtcatggaaaaatatgtagtgacaaatgcagactcattattagctgtagccagcacccatctctctctttttaatgatattccaaattgtattcaataagccatacttccctgcacaacccaattatttggggagtgggaagcttaagccatcagcatattatattaccctggtccctgtactggctctttactggccatgtggcctaagtgatctaatcagaacaaaccttggaacttttgcttagggtttttggatgggagtgttttctctcaccccttggacctgtggatgtgtagcctgagcagttgcagctatatcacagtatgccagagaaaacagaaccagagttactggataaaaccatctttgataattatcttgtctctggattcttctagctacataagccaaccaatccttgattgtttaagctagtctgcattcattgttccttataaccaaaaatattccaacttgctttcttgtatactagtactaagaattatgaaaatttgttttggggttaaagcatgcaagaagaataacaacatattatttattaattcaacaaatatttattgagagtctactgtgtacaaagctccattctagcctcgggtatagaatggcagatgaaataggtagtaagttaaggaatacagacaattaagccagcaaatacaatacaaggtggtaaatgctatagtagcataagtatagactactggtaggcatataacaagagcatattattaagtgggtccctgacccccgagtagcctaactgggaggcaccccccagtaggggcaaactgacacctcacatggccgggtacccctctgagacaaaacttccagaggaacggtcaggcagcaacatttgctgttcaccaatattcgctgttctgcagcctccgctgctgacacccaggaaaacagggtctggagtggacctccggcaaactccaacagacctgcagttgagggtcctgactgatagaaggaaaactaacaaacagaaaggacatccacaccaaaaccccatttgtacgtcaccatcatcaaagaccaaaggtagataaaaccacaaagatggggaaaaaacagagcagaaaaaatgaaaattctaaaaatcagagcgcctttcctccttcaaaggaacgcagctcctcaccagcaatggaacaaagctggacggagaatgacttcgatgagttgagggaagaaggcttcagacaatcaaacttttccaagctaaaggaggaagttcgaacccatggcaaagaatttaaaaaccttgaaaaaagattagacgaatgactaactagaataaccaatgcagggaagtccttaaaggacctgctggagctgaaaaccatggcacaagaactacgtgacgaatgcataagcttcagtagccaattcagtcaactggaagaaagggtatcagtgatggaagatcaaatgaatgaaacgaagtgagaagagaagtttagagaaaaaagaacaaaaagaaatgaacaaagactccaagaaatatgggactatgtgaaaagaccaaatctacgtctgattggtgtacctgaaagtgttggggagaatggaaccaagttggaaaacatgctgcaggaaaacttccccaacctagcaaggcaggccaacattcagattcaggaaatacagagaatgccacaaagatactcctcgagaagagcaactccaagacacataattgtcagattcaccaaagttgaaatgaaggaaaaaatgttaagggcagccagagagaaaggtcgggttacccacaaagggaagtccatcagactaacagctgatctctcagcagaaactctacaagccagaagacagtgggggccaatattcaacattcttaaagaaaagaattttcaacctagaatttcatatccagccaaactaagcttcataagtgaaggagaaataaaatactttacagacaagcaaatgctgagagattttgtcatcaccaggcctgccctacaacagctcctgaaggaagcactaaacatggaaaggaacaaccggtaccagccactgcaaaaacatgccaaattgtaaagaccatcgaggctaggaagaaactgcatcaactaatgagcaaaataaccagctagcatcataatgacaggatcgaattcacacataacaatattaaccttaaatgtaaatgggctaaatgctccaattaaaagacccagtggcaaactggataaagagtcaagacccatcagtgttctgtactcaggaaatccatctcatgtgcagagacacacataggctcaaaataaagggatggaggaagatctaccaagcaaatggaaaacaaaaaatgtcagggtttgcaatgctagtctctgataaaacagactttaaacagacaaagataaaaaaagacaagggcattacataatggtaaagggatcaattcaacaagaagagctaactatcctaaatatatatgcccccaatacaggagcacccagattcataaagcaagtccttagagacctacaaagagacttagactcccacacaataataatgggagactttaacaccccactgtcaatattagacagatcaatgagacagaaagttaacaaggatatccaggaattgaactcagctctgcaccaagcggacctaatagacatctacagaactctccaccccaaatcaacagaatatatattcttctcagcaccacaccacacttattccaaaattgaccacatagttggaagtaaagcactcctcagcaaatgtaaaagaacagaaattataacaaactgtctctcagaccacagtgcaatcaaactagaattcaggattaagaaactcactccaaaccgctcaactacatggaaactgaacaacctgctcctgaatgactactgggtacataaggaaatgaagggagaaataaagatgttctttgaaaccaacgagaacaaagatacaacataccagaatctctgggacacatttaaagcagtgtgtagagcgaaatttatagcactaaatgcccacaagggaaagcaggaaagatctaaaattgacaccctaacttcacaattaaaagaactagaaaagcaaaagcaaacacattcaaaagctagcagaaggcaagaaataactaagatcagagcagaactgaaggagatagagtcaaaaaaacccttcaaaaaatcaatgaatccaggagctggttttttgaaaagatcaacaaaattgatagaccgctagcaagactaataaagaagaaaagacaagaatcaaatagatgcaataaaaaatgataaaggggatatcaccaccaatcccacagaaatacaaactaccatcagagaatactataaacacctctatgcaaataaactagaaaatctagaagaaatggataaattcctcgatacatacaccctcccaagactaaaccaggaagaagttgaatctctgaatagaccaataagaggctctgaaattgaggcaataattaatagcttaccaaccaaaaaaagtccaggaccagatggattcacagccgaattctaccagaggtacacggaggatctggtaccattccttctgaaactattctaatcaatagaaaaagagggaatcctccctaactcattttatgaggccagcatcatcctgattccaaagccaggcagagacacaacaaaaaaagagaattttagaccaatatccctgatgaacatcgttgcaaaaatcctcaataaaatactggcaaaccaaatccagcaacacatcaaaaagtttatccaccatgatcaagtggtcttcatccctgggatgcaacgctggttcaacatacacaaatcaatcaatgtaatccagcatataaacagaaccaatgacaaaaaccacatgattatctcaagagatgcagaaaaggcctttgacaaaattcaacagcccttcaggctaaaaactctcaataaattaggtattgatgggacgtatctcaaaataataagagctatttatgacaaacccataaccaatatcatactgaatgggcaaaaactggaagcattccctttgaaaactggcacaagacagggatgccctgtctcaccactcctattcaacacagtgttggaagttctagccaggacaatcaggcaggagaaggaaataaagggtattcaattaggaaaagaggaagtcaaattgtccctgtttgcagatgacatgattgtatatctagaaaaccccatcgtctcagcccaaaatctccttaagctgataagcaacttcagcaaagtctcaagatacaaaatcaatgtgcaaaaatcacaagcattcttatacaccaataacagacaaacagagagccaaatcatgagtgaactcccattcacaattgcttcaaagagaataaaatacctaggaatacaacttacaagggatgtgaaggacctcttcaaggagaactacaatccattgctcaacgaaataaaacaggacacaaacaaatggaagaacattccatgctcatggataggaagaatcaatatcgtgaaaatggccatactgcccgaggtaatttatggattcaatgccatccccatcaagctaccaatgactttcttcacagaattggaaaaaactactttaaggttcatatggaaccaaaaaagagcccgcattgccaagtcaatcctaagccaaaagaacaaagctggaggcatcatgctacctgacttcaaactatactacaaggctacagtaaccaaaacagcatggtactggtaccaaaacagagatatagaccaatggaacagaacagagccctcagaaataatgccagacatctacaactatctgatctttgacaaacctgacaaaaagaagaaatggggaaaggattccctatttaataaatggtgctgggaaaactggctagccatatgtagaaagctgaaactggatcccttccttacatcttatacaaaaattaattcaagatggattaaagacttaaatgtcagacctaaaaccataaaaaccctagaagaaaacctaggcaataccattcaggacataggcatgggcaaggacttcatgtctaaaacaccaaaagcaatggcaacaaaagccaaaattgacaaatgggatctaaataaactaaagagcttctgcacagcaaaagaagctaccatcggagtgaacaggcaacctacagaatgggagaaaatttttgcaatctacccatctgacaaagggctaatatccagaatctacaaagaacccaaacaaatttacaggaagaaaacaaccccatcaacaagtgggtgaaggatatgaacagatacttctcaaaagaagacatttatgcagccaacagacacatgaaaaaatgctcatcatcactggccatcagagaaatgcaaatcaaatccacagtgaggtaccatctcacaccagttagaaaggtgatcattaaaaagtcaggaaacaacaggtgctggagaggatgtggagaaataggaacacttttacactgttggtgggactgtaagctagttcaaccattgtggaagtcagtgtggcaattcctcagggatctagaactagaaataccatttgacccagccatcccattactgggtatatacccaaaggattataaatcatgctgctataaagacagatgcacacgtatgtttattgcagcactattcacaatagcaaagacttggaaccaacccaaatgtccaacaatgatagactggattaagaaaatgtggcacatatacaccatggaatactatgcagccataaaaaaggatgagttcctgtcctttgtagggacatggatgaaactggaaaccatcattctcagcaaactatcacaaggacaaaaaaccaaacaccgcatgttctcactcataggtgggaattgaacagtgagaacacttggacacaggaaggggaacatcacacactggggcctgtcgtggggtagtggggatgggggagggatagcattaggagatatacctaatgtaaatgatgagttaatgggtgcagcacaccaacatggcacatgtatacatatgtaacaaacctgcacacgttgtgcacctgtaccctaaaacttaaagtataataataataaacatattatcatttaggagattcaagggaagctttcagcagaagggaaatttctttaaatacttaaaaaatcagccaaaaattgttgtgtgtgtgtgtgtgtgtgtgcgtgcatgcacatgcacataaaaggcattctcagagaggaaacagcatgtgggaaggcttggaaacagaggttgaaatatctgaaacaaacgcgagagctgggtagggtggattcatgcccgtagtcccagcacctatggaggctgaggcaggagggtttcttgagccctggagctcgaggctgcagggagtcatgatggtactactgtactccagcctggtgacagagggaaacagtgactcaaattaaaaaaaaaaagaaggaaagaaaaaataaatgaagaaagaaatttgtctggctagagcacagacgttggggaactagagagggtcatagaatgagaccaagcaggaaaaatagaaaggactggatcatgcaggaccttgcaggccaggctaaggagttcagatgaccctaggaacaatgggaaaatattgaagggtattaggcagagaaatggcatgatctaattcactttattgctcattcaaaggaaggcaatttgaaagttataaactagggacagacaaattcaagaccagaaaataagttaccaaaaatgcagaagtcaggggaaataaggccatcagggattaactaagctgttattaaacaagttttgatagatggagagagtcagagaataagcaaaggagacaaagggaaaaggattgaagagagactccaaacaaaagatggaagatcaagacagagcctcacagggagaaagaaaaggagtgctgagtggttgtcccaagtgccttgcttttaagagagaggaaaattagtttgtcaaaaacagtccagttgtcatcatgaaccaattacagatttacaccaagatgaatgcatttgatttagactatgtttttgaagttaaaaaatagctctctctaacctacctcattctctccattgaatagattgttctctgcaaacatatacagatgcacacacattacatactatccagaagacagctggggaagtgatttcagttttgtcatatttaaatagctatgacatttggttttgttagtttttcttcttgtttccattctactggcagaggttgtagtggaagaagaaaccttagatttatttagtgcttggattgaatcttgagtttccccacttactagctgtgcctccttggataaattatttcatctctctatgccttaatttcatcctatcttaaaaggaaataagactatcatcttgtatcaattaactattgctgtacagcaaaccacctcccaaagtcagtggcttaaaataacaaacacttgttagttcatagttctgctctggctcagctgttttgggcatggcttactcaagtgtttatggccaaccgagggttgactgggggttggtttcctaatcttgcctgggctgtcttacaggtttgggcttcagtcacaatggctcatctatagcccatctctcattcatcctccaaaaagagggcctgggcttgttctcatggtggctacatggaagtatgctagacctcctacaggtttaggctcagaactggcagaatgtcacttctgctgcattctattaaaaacacgtcacaaggctagcccagattcaagtgggtgtagaaatagactattctacttgatggtaagagccacaaaggcacactacaaaaggcatggatatgtggagtgggggaaaaataatgacaatttttgaagccttccaaactcttaccctgcattactgtgagagtttgatgacaccatcttgaaggttcctagaacagtgcctcactcacagatgctccatacctgttaatttgtccctttctatatatactaacagcatgaccagaaacactgtagatcatccattgcacattgcagtaggaagaggtgatagaaacagaacagataaagttattaatacatgcctcagcattacttacgcttgtttcaataggcaagtgttttttaaaaagattttcaaaagaggaaaattacaggccttgcttttagaaaatgtaggcaatgtggtttctctcttgctcttctttctctttctccttccctaagaataccctcagaatgataggacttcaccttatcttctctagaggaacaatgcgttattttggtctgcctttgatcactggtgattcactttaaaggcagggctgctggaaaaacgcagaaagcagagttgcaataagaaaaacgactatgtaaaaatggcttcctctggctctgtccttgattcctgggagttttttgagtcacttcttaattctttttttttttttttttttgagacagagtctcgttctgtcgcccaggctggagtgcagtggcgccatctcggctcactgcaagctccgcctcccaggttcccgccattctcttgcctcagcctcctgagtagctgggactacaggcgcccgccaccacgcccggctaattttttgtatttttagtagagacagggtttccccgtgttagccaggatggtctcgatctcctgatctcatgatccgcccgtctcggcctcccaaagtgctgggattacaggcgtgagccaccgctcccagccgagtcacttcttaattctcttgcctgtagagaacctgctagtctgagaagggtaggcagagtactgtttctctggcagttctcatcaatattctctctgagttctgccaggagttaactggcgagtgtattcctgtgtaatttgccaaggagatggttgacttacatatgacaagcagatacagtagggcttttacttcagaagttaagcaaaaataatggattaagttaaattaccatcctagtgattttacagaatgaaacaaaaacctgcaaattatgcacagcctttgactcaactattctaattttaccctaaggtaacaaacagaaaagttgtcttttttaagaacaaagttttaatttgtgacaattttagatttatggaaaagttgggaagagagtacagagagtacccatatacttttcatccagtttcccataatgtaaacagaatacattgcattggaacatttgtcataattaagaagccaacattggtatattactattaagcaggctccagactgtatttggatttaaccagttttcccacgaatgtcttttcttctgttctgggatccagtctaggggatcacattgcatttacttttcatgtcttcttggtatcctctggtctccagcagtttctcagtctttccttgtttataatgatactacagttttgcggagggctagtgagattttatagaatgtccctcaatttgggttggtttcttatgatttcttccctccaccaagaatagcctcagaatgacaggacttcaccttctcttctatagagaaataatgtgttactttggtctgctttgatcaccggtgattcactttaagggcaattctgctggaaaccccagagggttaacccacaggagccccttggttgggaatttacttccatctgtaggctagagaaaaggtcagctcccattgacatcaacggaaaggcaggcctatggactgtgctcccaggctaccaacagcagagagttgtttctggagaaataagtctacattgatttaaaggaacagatgtaaagcaagaataggattttcctcagtggatcctatcctccccaataggacccactctcaccatctctctcccttcccttcctttcccttcccttcccttcctttcccttcccttcccttcccttcccttcccttcccctccccctcccctcccctcccccctccccctccccttccctcccgctccccttcccttcccttcccctccccctcccctcccctcccccctccccctcccctcccctttcctcccgctccccttccctccccacccttccctcccctccccctcccctccctcctcctccccctcccctccccctctcctcccctccaccctccctccatcaccctccctccccctcccctcccctcccctctcctcccctctcctccactctcctcccctccccctcccctcccccctccctcccctccctccccctccctccccttccttccccctcccctcccctcccctccctcccccttcatcccctccctgcccctccttctccctcccctcccctcccttcccctcccttcctctcttttccccttccttcccttcccttctcttgccttcccttcctttcctggcccttctttcacagggtctctctgtcacccaggctgaagtgaaatggtgtgatctcggctcactgcaacctctgcctcctgggttcaagtgattctccagcctcagcctcccaaataggtaggattacaggcatgcgtcaccatgcctggctaatttttttattttttgtagagatggggtttctccatgttgcccaggctagtctggaactcctgacctcaagtgatctgcccgcctcagcctcccaaagtgctgagattacaggtgtgagccactgtgcctggccccacttctgttttcttgatgattctttaggtttggccaaattagactagggtctaatcaggagtacctaatataaaccatgctcatggaagcattgtgcacaacagtaaaaaattagaaacaaatgctcaacagtaggggattaagttaggcatttttcttgttatatccatatattgggatattttctagctattataaattgtgatgtagattaatatagacataaaaaggctgcttgcctaagaatatatagtaagaattcatttaacaatttaaaaatatctatatgtaaatgtggtttaaaaactcagcatactgcctaacctcaaccctgtgaagaagacatttttatcctggtgcctgccctgaagtgtcctgtggcctggcccacccgtgttatagcagtttactttgtctccacaggagccaaggcccattgctccgcacagatgaaccctgtgacctaggaagaagttttcccttcctgggacaaactgcacacatcagaaaaatactgcccatcagaaggagtacacaaagacaatggggctagtgatgtcttctaaatttattgcaaggaataaacaagataacatataaccaaatgacacatatgaaattatttagctcaaggtaactatagctgctgaaggtaactatagatgctgaaggtaactatagatgctgaagttaactatagctgctgaaggtaactacagatgcaggccaagcctgaagaatcatcaagaaaacagaagtgatggggagagtgggtcctatgggggaggatagaatctgctgaggtaaatcctgttcttgctttacatctgttcctttaaatcaatgtagacttatttctccagaaataactctctgctattggtagcctgggtgtgcaatccagaggttttcctttccattgatgtcaaatgggagctgaccttatctctagcctatagatggaagtaaatccccaacctcctgtgggttatccctctagggttaatttctatgcagtggtttgcactggacaatgatctcctgaagaactaggacaatattttgtcaaccccaataccttgggcggtatttaataaaattaacaacaccagtcttctgtaacattaaagcctccctgcatccttttcatgttcctttcctcctttcacctttaagcagtttggagtgctcaaactgcctcatcctctcttctccaaactattaaaactgatcattgagaacttttctcacctctgggcccttataaatgctgtaccctgtgcctggagtgatcttccctctggtctttgtgtgctgactcattctcatctgatagttctctattcaaatgctctctccttagagaggccttttgaccatgctatccaaagaggcatttcccagtgacttcttatatcattagacttttatttccctcacagaacttatgctaatctacagatgttctttctttcactatctttctctcccacattctgccctctacatgactcccaacctgtttgtctctccttctttgttcattttgtgtctccatgacttgagtgataactccatgaggcagagaccttacctagctggtccatcattgtatccctaacaccagctcaatatctattgaatgaatccagtggaggtaacttactcatttctctaactttactttccctcttcaaccctctcccagtttaacattaatcacacttgctgctcaaaattctttaatgtcttcccatgacctcttgctgatgtgtccaaatatttagatttcacagagcaaacctcaaaacacatttcttgggttgctcttggctcacaggacttttattctatcaagtaagaatattttttttaaaatggcaaagcctcatgagaattaatgacaagaatgcagtgactaatattaacatgaaaatatgaagatatactctcaaaaaattaatttagttatataaaatgcttcctgtttttcctattttaccatggattatggaaaattctgaattaccactcagtatattggaataaatatttcatggaatacaataaaatctcaagtcaatcttacaaggtcctttgtatttatgcccctgcctgcttgtttgcctcagttcttgctccttttccttctgtctttatgccccagatacagtgaattatttaattgcttgaggttttttgattatgccttgtctgtgcttgacttggagcctttgtccatgctgcttccttggctggagagcctttttctctaacctgcctgattaatttccacaggtcgtagtttctgcattgtctgctttttgaggtctaccctgactcttctgatcacatataggttttcttcctctttatttcctcatgggttacctcatttttgcaatagccacgtggggttgaggttgtttatttcttgtcccctaattaaacataaacccaatgaagaaaaagactatgtcttttcacgaggtactgctgtgtaatgttctagatgttagatattgttatggtttgaatgtgtcctctgaaatttaatttaatccccaaggcaatagcatcagatgtggggcctttagcagatgatcaggtcatgaaggctgggattaaagcctttatgaaaggggttttacactgagtttggccctttttgccctcccttcttttctaccatgtgaggacactgcgttcatcccctctggagaatgcagtaacaaggtgctatcttggaagcaaagagaccaggccctcaccaaatactaaaactgctgatgccttgatcttggacttcccagcctccagaactgtgagaaataaatttctattgtttataaagtacctagcctatggcattttgttaaagcaacacaaataaactaagagagagaacaggaaaaagcatgagaattgtagattgtttaggtttccctctgccaccgtaggtggggatgagagtgcatcctgcccctggtgacgttcaaggggaagaagaccaaatggaattgagggtgtcttatgctctaaaccttctggagagagactttttttcttcttgctgatagactgatactcttgatatagccaatgtagggtggggatctaggacaaagggtgttgtaggaatctgcactggcactgaaggggcacaaggagaacttgggactcagttgactagtgaaagagaccagacagaaacttgggcttaatctccaaactgctattaagagttatacatttgcctagaacatctttatttcatatacatctcatgtacttttaatatactgagggcattagaaacaggtagctggaaaggactgagcatttttaggactgagggaatggtggctttaaaacatctgaaaatcatttgatattcctctcaccaaggggtgggtctatgtttcctccccttgaatctaggctgatcttagtgatgggttgatttctaaataatttaatcatcttttggaaagagtatttataaaacattttttgatttcttaatcagtaactcagaatatatttgaacttcctcttaacaattcaggtcaccataaacatcacttactttgccctctgtgactgctctgtgttttctgcatggtcatttctgatttttacagaatgtgattttaagatctgcaatgatgttgttttcctctcattttctctttgaattctttaggttttctttacatgacttttttattatcttacaattatctcatgaattctagtaaaagtcttaataagttttttaggtaacttgttttcctctgtgagtttcaacaaaggaaactatttaatttcagtttgaattcaaagctatttctccaaccttcacattttgtgtcctccaagttgttttctgcttctatttcagataccagtaaagatgtcatctggccaatttgtgtgaaaaaagagaataattctcatccaaaccgcctgtctctggaaataagaaaagctctgagggtctccaaagttaccagaggaaggctgaattttatggtgattgataatatttccaagcttatggagaaaaaaatatcattagtcttttccatggtagaaaagagtaaagcctgtaacaaaaaaagtgatacagtggatgggatgatgagacccttgaaataagcaaggatggaccagaaactggtaacactcacccatggaatttcattatgaagtcgtggcaagggccaagccgacctggatttgaaacccatctcttcaacgatgtagattttgacaacatatttgatttctctgggcctcagtttgttatctgcacaaaagggagatatgagtggttacgttattggattgtcatgaacattaaataggataatgtcaaatcattcagccaagtttctagcatatagtacaggttcaaatattatcttttttttcccaccaacctcttttccaggaaaatgcaaagctactctttagccaaattttaaaacaggggatatttattttgggaatcattaatacccatctgccccttttttggtccattggacatattgaaatgaatgattaatacttatcacttcatggtgtacacattgttttgtttcttatatccagagtctagtcctcaactctaaccaaagtaaaggaaactggaaagacacacgctttttcagtcattaatagaaagttgtccaggtaagtttctgatggtatatcagttagaaataatatttagctatttgtaataaaaagctgaaaacagtagcttgaatcaatggaagactttatttttctcctaatacagctgacaataatgttgttgcctttatgatatcaaagccccaggttccttttatctttctgcttaacctgccttggcaaatgcttgctgcttcatagtcacatgatggctgacttactgtaaccttcaggtagaaagaaaggaagaggtaaagagataaaggtacatcccagctgattcagtatctccttctctttgaaaactctcacagaaactgccctataacttctactgacatctcatctcaatggctagatcagtgctatataacaaaactttctgcaatgatagaaatgttctatatctgaactatccaagatgttagctactagccacttatgactgtttagcatttaaaatgtcacttgtggaactgacaaaatcaacttttaattttacttgattttaataaatttaaatttaaatagatacatgtgtctagtggctaccacaataaatagtgcagggctagaccttaatcacatcactaccccatctgcaagaaaagctggaaaatgaaggtttggagctaaacacgttgctaccctccacaaaattatgtttttcttagtaaggaaaaacaaacaaaaatgaatataggctgggcagataacagcctctgcaaccaagggatatttgcttgctaatattccttaagcccagaggaatggagtgctaatgggtttatcataggcatgaaaaatggtgtgtctgggaagatattatgtagttaaaaagcagaatcttggagctggagttcaatccaaatactttctttttacaatgagaaaactgaggctcagagggacaactgagagacctcattaatagagcaataggaaaatctgctctgaaattatacagagctatttagtggcctttataacatcactcatgataaaatgtaaaatctcagaaagaaaatgccctctgcctatggtttttaaaatacaggaaagaaaagctagagattttgatgccacctattggtagacagaagtataaactgccctttcgtagcacaggttgttacccaatgttagaggcaccacaggtggtatagggttctcataaaaaggaatgacagacagtggaatatttaattcctgcatcagcttgcaacatgtatgttcattttcccttgactcttagcatcttagaaaaagtgctttcttagagtgttcctttctgctttccagtaatacatcacacctcaggcatatacagaaacaccagaggaagacatatcagtcagttctcaaaaatcacttgaaatagaaaaaaagaacaaatttttgagctataaatagccctggggtgagattcaaagttcttatatgatccacagcctcaaaaatatatcctgttatttacaacagtttcctttagtagttcttacagaaaaaaaaaaaaaagaaagaaaataaaaggaaacagaaattccatttcaaaactaaatgctcaccctgactcattcagggaaggatccaaggtttttgatgcagggcactgactctctgcctgtttttccccttcatcatctgctccccttaaaaaatggtatcaactgcattggtaagaatccacatttcttcccttttgttccctggcttcattccaggatttcacttgtcacactgatgggtgagatgcctttcatattggcataagacactgagcggatgcctcctcttatcttatcaaacagaaacccggcgagtgaatctacccagagctgaagcttcctttgcaacttgggaacaccagggccacagtgactttgtggcttggctttagataaatttgaccatggctgtagaacccagcagctcagaatccattaaaaggagagctgggaggaggtgagtgatagagacaaggggattttgatgttacaattgttgaggggactgtggctggcgggcaacttgctgtgggggcagtgattgaaaacatggattattagctggttacaaatcttcatttgtacagatgagctgttgatttcatataagaggtggaagtaaattctgctttatgtgccctgtaaaaagcttctttgaatttaccttcagtgtcatgccttcagaaaaaaattccaagtttctggcataaagctgcacgttttctgcgcactggcatgcaggcaactgtttgtttctaattacggagctgaagcctgctggcaaaggaaaccatatttgtcacaagttgtggcattgtgtttagtttgtgtatctatgcttttaacatgtagggccaaagataactatgttgtttttctttttccctatgagcattgactctataacttcttttctatggtccatgtgttcacttattctagctgcccctttagagactgcttcaatgaacaacccctatcctcccattaactagttgtgttccctggtctggtcatttcaaccgcccacaccctggatttatttttgtagatatagtaaaactttcttgggcaggttgttgtaaaaattaaatgggatggtaagtagagtgcctaacagattgcctggaaatagtacatgctcagcacatcttaattccttttctctcacctgtaatataagaagtttatgttgaatggtccctaaggtatttatattatttttaattttataaatgtagaaggtggtagacacctttctaggcattggggttataattatgaacaagacgacaaaacagacatatcccttgccttcatagaaattaaattttagaggatacaattaacatgcaaggaaatgcacaatgacttttccttcttcttccttcatctttgcaagttcaatccaattcaaattttgagtttatctctgaggctacctcttaacaaaacctggaagtaatgtttttggacttaacattttcatatttagtagtcatacactggttttgcctgcttagcatccgtctcccctttcctggtaggaggaccctgaatatcccttggagaattgtccctgtgtctcactcgcaatgtgtgtagatcaggtggggctccatcctggctccaggagtgctatagaagacatcacatgctcctagacattgtggaagtcctggcccattagtgtaattccatatccaaaggtcacaacgattgacttatgcatagccatgtgacccaagtttttgcaatcaaagcaaatccaaggatttctgtggtagtttcagtgtacagagaagctccctgaggtcctttccagggtccatgtttagtgttatcctatttcagaaaggctttagaggtgactgaaagaagaaaaatgttatttgtgttctgtcagaaggttgtccctttgtttatcaaagatatttctgtctacttctatagaacaattaagagggggtcttcctccttaccctattggttctccttttctggactttgaaattgagaacttcatggttagtgaaaagattttggctaatatctcctccaaccttcaggttggagaggctttgttagatagccccttaatagggtgagaaggaagaccttccatctcccctccacgttagatgtaacacactctataccatcccaatgtcagaaagagaccgtcattcactttacttcattaattccaaagtccaatttgtgagtctgacaataccaatgtgcagagagaatttagttgtctagtttgtctatggtagcagacataatcagaaacaatgccctgtatttgaataagttcatttgtctgaatttgaataagtttgaaataggaaggccatactttctctctaaagtgctttaaaacatgtggaagtggtcaccccttacataagacagcatatttatatctatctttaagcataagtactccctaagtatttctttatcttatttgtgaggtagatgtattcagaaactcatcatgagatgaagaaaatactctttgtccattaatttactcatgcattacttactaaaaataatttccaggctcctgccatacgccagacagttttgtagacacgaaggatccagagattagcaacacctttaccatttttggtgacagttaagcacccatctaagaagttttctttggtgagtgccaaaaagtgtaactcccattccccccacacccgcgccgcgatacgaccgctccaccctagagtggagatggagaccaagcacttggagatctaaatcaagtgtccccaggagctcagttgagcgacaaagctgagcagaaagcccagactgcgggcgcggcaggaccacggagagcgccgccgccaaggcctgggcggggcctgagctcgggttcccggggcaatgctcgtctccgtcagcaacccccagggggcgctcgcgcggaggtttcggaaccagtctcttgccgggttgctgggtgcatgggattcgtcagaaggtggaaatctctctgtgagaagctgccatctccccgccacccgctcgtccccttctctttctgccaccctcctttccttcctccctcgctccactccactccctccctcttttctcagtaccctcctctttactctccgagttaactgagagccgacctgacatctccaacattttcaccctcttcccccacccccatcaccgagaatggagtcagggtttccggagagaccgaactctgctctcagcacctttcccagccgctgttgctaaactgacctcggaggacgagaggggaaggaggtgcgacgccccttacatcagtacaaaactaccacaccaaccacctccacttcaaagccggattttgcatcctgggggcgggacagacctcgtcccgggctgaattctctctccactcttcgagattggcacacccaggtaagtaaatgccaactcttcattcctgtgttcctggggcgctgtgattgcaaagtctgttggagctgctgcgtagcaagaccaacttttgagatgcactggttctcgctcacctttgcacgtttgtcattgctgttgttgttttaaaaagcagcagcaagcaacgtctttaatctgaagggacttccatcccctacctctcgccttctgacatccacccaactcgcccaggtggggtggggcgaatggagttggggagaaagaccgcggaggggaggggacagcatggcacgggtgagggataggtcagggaagtcccgaaggcggaagaaggggtacggttttcaaaatcggggaaggggaggggaagggagttctggctgaagttgcagcttcctctctgacagtgagaaagctgtgggacattgtagtcccttccaatggcttgacctggctgcggttggattcagcctctcaacctcctcccccacacttcttacaatgaggttctaataatattttagttgcctcttctcagtgttaaaaactaatgaataggcttgcaagtgctttgattcaacgtagtccttcagcgcttcttcctctatggaataaagtagccagaaggaaagggggacggggacaggggacgggactggagggaccactgaaaccaagccacagctgagtaaggagatcacgaccccgcgtggtatcacagacacacgagaactgttagggctgaatccaatggagataattaggaggtggtccacgccaagtcaagcgagtgctgattaccatccggtgaggagcaggctaaaccctgatgaaaaatgctcctccttcatcttggagtaggtgggctttaaggccctatttcccattctatgttccaaatctgacggcgccccagggcgccttggcggattgcctttcagccccagaacctgctaggctccagggaaagtcacaggcggcagagatgatccaaggggcgcaaatctatgaagggcttgatgtgggtggttgggaagtggaggggggaaaggtgagcagagtgaggcgggagggggctagggaagcgagagtgctctgggaagctttgcaagagagacatctgagaacctctccctctacacacacacacacacacacacagacacacacacacactcacacactctcacaggatttcagtgacttgtgggaaaagatgcctcagcacctttacaccctgtgttcaaaactatgcaaaaccaactcttcatcctcttgctgctttgccagggattttaaaagcactgttctggtttttcttggctcacttggttttgtttcctgaacagcacttttgagctgtccaagatactttaatatgttatctttaaatgaaactaaatcctgctcattcgcgcgcccccgcgcgcacacatacacaggcgtacacaattaccttaacttcaaataaagtgttcttttctccatactcttctattcccttaacaatccctgttctcaaaggcctttgtgttttattttctgctttataacaaaacaaaaaaacaaacacccaccgtcctatgacacaggtgttttgaatccatgtcaatttttgtagttagtatatgctggttaaaccacatagcatatcccccaaaaagccagaggcaagcaaaaacttaatttgatgcccttcaagtttcggaaggtcccatttctttttattaaccaaaagataagatgaagctcagcatggctatggctgtgattagataacttctgatattttcatttcccttaccgagctgctgcttctaggctgaactcattcacctgcccatttttaaagagagactgacaaagtcactctggcaggtcaggactcagagttagtcaaaagttctcacatgtagagaggtgcataaaatagagggagggttggaaaatgcagtcagaacacctgtgttaatagtgcatactaataaaggccaacattttctcaactatctctcatgggaagattcttatggttttagaggatcaaactcaaaacacatcagaatgaggtgacttttccattaacattacataaaaggatatattggtctatagcaatagtagatgtttaatcctgggcagttttgtatgattgtgtgagaagagattgcctataattgaaccaaacctctacttatgtgttaacaagtaaaaactcccatggccatcaaacttatgcctttcctgtgagtggtcaaccttatttttattctcccagacacaggcccagcatatttgactgggagaaggcacagatgcggtacagtgacttcccagtttgagatagttgctttactaaaattcctaaatatttctttgaaaatagttgctctgagttgtttcttaagtgtaaaaagaaattaaaagacttcctgtttatctccaagtctccagtagcaacatgacattttggtgaattattggtttgtcttaaggggactctggttttagaggttttaattaaaaggtgtttgttctaaagtatacttaatctgcttgtgtatttctaattaaaaatacctcatttcagttagtaggaagtaaagatgttatctgtttatagagaagttttatgtaatattccaaaacaatagaaaaaagctttgattcttttaaataattagattattcaagcccattattatgacttaaaaccttgaggttatactgactataagaaacaatcacagaccaaaaaaaatgggttaatggtggaatctttattctcatatgtatttgaatcttttggaattaatactgaacacatttataaggtttgcactatgccttcttctgacttcacttcgaaaattctttgaaatgtaacaccctagaacattatgttacctttatccacataaagaaaggatcttttcatttagagatgaacttattgaagatgagccgtcagtgttgtgtgtaatcaataccacacattttcagagtggtctgaatccagaacaaagaatgagacaggtactctgatgatatcaacttggctaattgggtaaaagtctctacactagttgggaaaaatcacttcatgcatctttgtattttttaatcagtggtgtgtaagaagatctgtattccgtgcactttgaagagagaaagggctaaatttgtgttccatatttgatctttccatttttgtcttgttaatattttaaaagaaaaacaaaaacctttgcagatccattcagtaacccaaagtcatatttccttggcaacagtagccagtacactagatttacaaaatatcaaaatagaaaaatttaaatgcattcaaaataaaatgtcacatagttcaagaccattctttggtgcattaaaactgatcttccaacatgtaataatacagttgcctttctcctgattgaatgtagatggcaaagaatagattactgattttaattctttttaagatgtccccaaaatcttataatattttcttttcagggaagcacattatgataataatttaggttggggttacacatccattttttggataaagtatttatgtgatagttgatggtaaatccaaaaatcaagcacaataaatgggtcaggtaagatgcatcatcttttctatgttatttgaaatagtctatagtaaggcctcaattagtgttaaactcagtgaatatctcctaaacttgtgactgcataataaaaacatattagtgcctacatatactttcaggttttctttttctgtactagaaactgcagttatgtgggagctttctgtttgctgtatgaactactaaatatatgtgatatattggatatattttctcctaaatcagcacatcctgggaagtcctttatttgtctgctgtattctttggaaaccctcttgggaaccatcagcttttagctcagtaaatattgagggttggaaggcaagtctcaaaaataagaaagtgataaggatgccttctttgggaaagtttattccagtcctattattttagtcatagggctggaaggggagcccatttaagctgatctgtgatggactcatctctaaactgtgatcagcaactttcaacagtgcaatatttacccaataaatgtgattgaatttgtacaaagtcattgtctgcagccatctccgttaatgtgcatgttctatgactctcagaactggaagagagcttggggatcatctgctgactctagcaatttaatttgacaaatgtggaaactaaagctcaaataagtgacttctcaaaatcaggagactcattcaacaacccttctgattactcccctcataaagaaactcaagttccctggagataattacagcagtggagccaatctctggcaccatgtgcactgctgatctttattaagtatgagttagggatgattgcgggggtgtctcccacctccattagagtgttaggaggagtaggcttgggacttattacattgctgtctcttggagccagtgcaatatttacccaataaatgtgattgaatttgtacaaagtcattgtctgcagccatctctgttaatgtgcatgttctgtaaaaaattgctcatgcatagacttagctttctattttaaatgtcacaattgagtcaataaagtaaacaaagagagtttatgagtgtttacagttccaggaacacacaggggaatcctttattctgttttaaattaaagcgtcattcaaaaagaacaaactttcttaaatgttgcttttacatctttggctcagaacacagtatttctaactttgtttttcttattacttaggaaactagagaaatttctccttggaaatgtcagggggaaaatacagtatttcggattaactttagaaagctcaggtttaaggcttattgaccagaagacctctttcttatccaagtgtagggcaattcattgcaccttgaggtaggggaggagcaaaatcaggctggcaggggtccacggcagggcaagccctaggagctggtgagtctagaaggacggactagagagagctggcattggaatggacaatcgctagagggcgccggagcactagcagagtcaacctccgggacccataagcagggcttctaggataaggaatggagtttgacccaaccccaagatatgccctggggatattggttttctcaggtgcatctgactctccggcctggattgcctcgctgcggagaggggacaaaaggttttgccctgagcatctggtggtgtcttccagtgcctggttaggttgctccgcggctggacagtctgactactctcaaaactcctcgtgacaggcctttctggggtctgatcgccctttgtttccttacacttgggcctgttatcagaagaactctgaatccggaaataccttgtttaaatttgggctacagttttcaagatccaggcatttgggtgaatcacttaacccgagtattaggatctggaaaatggggctagtaattgttgtaaatgtgaggtgtttaaaagtgtctggcattttagtgcgtagataaatgctacttcctgtgcccattctcttgggagttctccccaaacttcaccctttaaaaaaaaaaaaaagaaaaattaagaatatattttacttaacacaaaattttaaaaaatcatgtaatcgatatagagattattgagatattttacattcttttttttctagtactaaatctttgaaatctagcatgtatttttatacttacagcacattttaattcagatttgccacattttaagtgcttaatgctcctatgtgggtagtggctaccctattgaaacagtgcagatctataagaagagaaaataaaattactttcgccatttttcctttttgttaaaggttagcaataatatatacaatgcttggcacacaataggagcttaacacaggttcactgtgattgttatttgctatcaccattttatttttaaatgggcctcttctcccatctcttatcccttcccccatctcttaccccttccccctcagcagaagggtctcattcatctatctgttgaataataattggtcacagcatttatgtcaaaagctgtgctaggcactggggataaacataaaaacttgaggcacaggcagactggtgaaaagaaacattgaaattgtgctgttaagtgtgaggagaaagatgaacaaatgatgctaggtaagagataaagaaggagatatttggtttgtctcaaaggacctgggaagtggtcctttacaagtcctgttatactaaggtgtttttcctctccctgtatttcaaggaaacaggtggacagaaggtaattttgagggagaagtggagggggtggcatctcattcagcaggcactttggtttgtatgtattcttaacagcgctaatagagattctaaaatctaatcaacttgcaccatgccctgtatgtagtaatttcatcaatatcatgaagtaaatgcctaaatcattgacttaattcatttaaacagaaaatgatttggaaggaaatgtaatagaaatataaccaagaacctttaccattaagtgatgggtctgaaacaatctaaataagaactctgttttaaaaatattgaaaggtgtatttcatacaaatatccataaaaatgaaaaataataagggcaatagaatggcccaaaacaatactttatcattatcattaaagacaaagaaggcttttaagatgttagtagccactagcattgcaagatgactgaggtgatgtctttgttatcttcggagcagttgattcaacaggtaactcagagatataaatttcagtggcaaaagtcaaggagttttgcacctgacattgtgctaatgtgaaactagggatggacacctttgatcatgtgtgttaacgttatctggccaggtagactgcagagctcccgagaagccattgtcagatttcttttgcttggtggcctttacgtcctgtgacttgactgattgtgaattgtattggagaaaaggcacgataagaggaaaagagtggaaatagttgattttttggcaactaataacactcatgatagctcctaacctgatttaattttaaaaagatgggaaaataaatgcctcttatggaataagagaatgtgagaacttggcaatcccataaaattatgcacacccctcccattttccagataagaaaaaagagactcagcaaggtgaagtgacttgctcaagctcgttggtggcctagttacagcagtgagaataaaggcttcttcactcctgggcctggggttcttctctggcccatgccacaccacactcctctctcctctccacttcatgcttcagggggtcagaactctctctgtcttgctcacaactgaaccccaaacagtgctaggtacctagtagttgctcaaaaacttttggttgactgaatgaaataagctgtttctttcttcctcactcatatcaggaaatgtgccaagaaatcacagggttgcaatgcagtttgataaagacaaatatgtgttaagttttgttatgataagggcttaagctttaaaagtaagcatacttagtttgaacgctggctctggcacttaatagctgttttgctttggggaaattactaaacctgtccctatttcctcatttgtaaaaatggagattaaaccatatatataaggctataaggcagaagagaggccttgactcactgtatgtatgcactcaatgtttttttcctactttcccaaccttgctctccatccatcctgagaagatttaaagtgggatatagtacttcttttaaaaagtaatgttaatttatttcagataatatgcatttatcttgcagaaaaataaaattatttaattatataaatataaatacatacacagtcactagaagtgtatattctgtgggttagatattaatagtactgttttataaataatttggtcagttgtcaaagcactggcaactgggaggaagaggaatgaaatttagggtatccctattccaattcagaccagggcacatttatccagtccatgcttcataagatctttgcttcttgggcttggattctccaagttgaagttaattctctttaccataccctctcctggcctggctatgcttcagcccctgcattgtgtgccttgtaacatggttattcatagatatgaccatgtctgtagcatgttgcaagcttttccaagtagcagttgtatatcacacttcttgatatgactccagagaacctagaacttttttggcacataggatactccctctgtcactctgggtgcatctccattcccttagcaaatatcctgcatccaggcaaagcatgcttttaacttactcaaaatctattctacgcctgctctcatttattaaaaatattcttattatattttgattattgactttatcatatcatccaaattgatatatgaagttgtatgacatattactactgcacatagttgtatctgtaatacaacatatattgtacttcatgaaaaatttataatatttttcaaggattattttgactacgtgtgtgttgtactttacgcattgactttaaatcacagtcctcacctcaaatgtgctccactatatttgcaagactattctgtgtgttgtatgtaggtaggtaagattgtgtattggtgaatggcataaattttaagtcaggaattcctaggtttgaatttcagctctgcttaacctgttgaagctcagttttcatagatatagaatgagaataatgattgtgtctatgttataggatggctgtgaagcttgctgtcacttggaaattactcaaattgcaacctttatttgctggtggcatctctcacaaactagaggcttattagtagttaattaccctaatggtaatggtttgctgtgttgcaggggaattgtgaaaattagaagtgtgtttatgaaggtatggtagatatcagcaacaaaatgtatgcttttcatagctactgaatcatttacccttcttctccctttcctcctctcctctctctctgttcctactcacaaattttatgcccagccacaaaaggtgactcaagcgttatgctggagtttctctaagataaaacttcctctgtttctaatggttccagctttatttcaaatgaaaggtacgtttagtactggccccaggaacacaaccagaatacaaaatcaatcattccaccctacaagaccagcagcagaaatttattgtatttgactttgtttcccctgcccttgtcccaaaaggatcttaggctgccagcattagacaacatattgggtatctctctgttacgaaagtctaaaatgttactggcataaaatattatcttcaagccatggttctcaaacttgaggatgagtcagaatctccgaatctcctggagggcttgttaaaacccgaagtgatgggcccttcctgtggaatttctaactcagtgggtctagggtaggagtaaaataatttgatttctaacaacttctaaaggtgatactgatgctactagtttggacaccacactttgggaaccagtgccttaaatatttactttatgtagacaagccatgaattttgtctcctgtgtggtaccactgagaacagcattagtggtaaagaaagggatctggcatttactgagcacctatgacatttgccatctgccaggtacctcatggggcactttatacacattattctatttaagactcacagccaccctgtcaatcaatttatgattatttattgagaccctatcatgtatcatgtaatgtgctgtactagactttggtaatgtgggatgaacgaaacagacataatcctgaccttctggatattatatttcagcaaggaagacatgcttgagcaaataattataagggtgattagcctgatatataaaaaatggaagaccagagaggccaagtaaattggctgtgattacacagcaagtgggagacagaggagacaaataaaacccttaaaaaccattttgctccaaaatgtacagtccttccactaaaacataggtgctcaaacttttgatccacagggtgctttacactcttaataactattgaagaccccagggctgggcgcaatggctcacacctgtaatcccaacactttgggaggtcaaggtgggcagatcacttgaggtcaggagttcgagactagcctggccaacatggtgaaaccccatctctactaaaaatacaaaaattagcccggcgtggtggtgtgtgcctgtaattccagctactcaggtggctgaggcaggagaatctcttgaaggtaggaggcacaggttgcagtgagccaagattgcgctgcagcactctagcctgggcaacagagcaagactgtgtctcaaaaaaaaaaaaaaaaaaattactgaagaccccaaagagcttttgttcacgtgtattaaatctatcaatatttactgtattataaattaaaacaaagcagtttacccgttaagaactgctgtatcagacccatgctgcaaatagtaacatcttttctagactctgaacctgaatttgttttgatgatttttgtagccatcaaagatgagaaacttctcatctcctcctaaacatttgttttaaacccaagggcttcttttaagccttagcctgtatgtcttgtgatggtgacttgctaaataaaaggctgatctgggccgggtgcggtggctcacgcctgtaatcccagcactttgggaggccgaggagggcggatcacgaggtcaggagatcgagaccatcccggctaaaacggtgaaaccccgtctctactaaaaatacaaaaaattagccgggcgtagtggcgggtgcttgtggtcccagctactcgggaggctgaggcaggagaatggcgtgaacccgggaggcggagcttgcagtgagccgagatcccgccactgcactccagcctgggcgacagagcgagactccgtctcaaaaaaaaaaaaaaaaaaaaaaaaaaggctgatctgctttgcaattgccttttgaaatatttaaatctttatttattttaaaaagcaacaattaaagtatcaatcacggaccaaactaagatgtagtggctttattatcccttgaaggatgtagctgaaggtgaagataacagctcataaaagtttgtgagcagcattgtgtttgagtttctctgggtacacggcactgcaaaggaagccccagaaagcaggctgagggatcacttctgctgcctcattaaagcaagagaaaaaagatgaacgattggactagagtgcgtgaggcttttatataatgttggcagctgaattatgggttaacgactgaaatacagccctttcccctcattttaatttgttgtctgatgggaatgagatgttctatagatattttatcttggtgtgtaatggtccgtggttgttcagacactttgatgctctggctgactctgaatgctttatagcatcattaagtttaactgagtaaattcaactgaatcggagctgacataattccatgtggttctcaatcggtgatcaatgaactcagattgccttttatttttatggaaacaagcgaatgacgggggctgctgcagtaaggttactgtgattatatggatgtagcagatccttggataagaagttagaaaacagggaatcagatagttgtctgactgtttggtctttttgacaccaaacatctaaatcactggtttgctgaacaacttttaaaatttttatccagatgtttgacatcaggcacaactcaccaccaaacaagtcaaaaaagtgcagatgatcatttgtcattttagtagaagctgaaattcactgtgaagcatctctgccagctgacctcaggcagcatggattattattattattattttttttttgtatagcatctttgtgtacaggaaatacatttctggagagaagcacttgcaggaaggtccaagcatcagtgattgtacggcaagttgtacctgtttttttatgcaacatcaagcaggaatctgtgctgtcccatgaggggccacctcctgggaactcttttacctgagtttcttattctttaagaagttgtgagttacttgtcaagaattctcaaattttgactcaatggttccatgggaacaatgcatattctcactctgaatgatgaaccctgttggtttcacagattgctagggctgcttttaagaactccttttctctaaagcaggcacaaacagggaagataggtgggtctccttgttccttacttacctacccctgcccagggaatgggctcagggaagaccagacctgccttctgatcctacatgtccatgtctgccctgtatttgacttgccagtcaagctaagcagcctggaaatagacttgctgtcttcagcagaaatggttgacagttattttctatggggtggaataatagggacctgcctaatcctatgggaatatcatcttccctatgctggggagaagaggtaatatccaatttgggaggcctggttcttggttacttagatcgaaacttctattccactttgcttggatggagagaaacagttctatttgtgaatccgattcccttcctgtgttttgtgaatacttccaataggtggttacaaagtttacttcctaagctccttgttctgtgatttctttcctttatacatacatttttaacttctatgaatggggaggtttgaggtaaattaagatctgattaaggcaaacttgaagtctgcagcccaaaaaaggtcattgtcaaatgagatccagtagaacagggatcagcaatctgtagcacatgtgtcaatttcagtatgcacacttttttcataaataaagttttgtagaaatactgtcatacctgtcgttgtccatagcttctttcaccatataatgtcagagctgaatagttgaaacagcgaccacatgatgtgcaccgcctactatctgattcctgatagaaaaagttagacaacccctgcatttggagcatatttttatttggccatctccaggaacctacataggaaacatatatagggttcaaaaaatccaaaggactattattctgaaatatgaactatgggccaaatagctaagtagtagaactttgttgctatgcattgtgaggatcttgcacacagtaagtacttgtggcatgaatgattatatatttctagatgaatgacttatggtgtgggttccatttacccatttataaaatcaatgtgttttatttaatctctaaggatccttcttgcatgaccattctacataatattagcaagagaggtgatgaggcaaacgtaaacacttttgattctctgcatcccagtgtgccaatgtgacagccacagtctcttgaatcaccatcagtcagatttatttagcatcagctggaattatcaggcaggtacaaaaagcatgaccatctgctgtcacagtgctatcaagaatcttacctggagagaaaaaaggggatttaagagttgagagcatcaaagttgtgctttgtgcttgttttgagttggcttatggaagtggggttgaagaacatactgtttattgtttgtgttcagcaacatttgagacttcctcgtgtgcgggtgcaattttgggcatgttccagctgtgcggggctagggttaacagtgtcctgtgatgacctgctgtgagtgccttcactcatgtaccaaaatcataggtgaaaatcacacttccactggtttccaaaattactctttagggagttggagagctatggatgaattacttggaggggtggagatgatggtgatcatctagctcttattgtcctccttccatcccccagggaaaaaaagtgtaaaacatgtgatcctgaaagaaatgttcatgctttatgatatgattaaggtagctgactcccaattcaaagcatatactatgccacccttcaggaactggagttcccacagtccccctttcctgagaagacagccggagtttctctcagctcagctccacagatttgaccatggggttatcatttattaatttagacattttagagggaggcacgctgtctctgctaaggtgtgagcagagccccagcctcagcctccacatcagaatcccaggctgtacccagagttttcctctcaggcactccagccttcagagtgctgggattcagacggagcagccctgcctgcctcccatctgtggtaagtgacttactctctatggcaggatgggatggctgaaagcaggcaggcagtgaacaacctggggctgaggagggggaaagcccttcacaagctcttgtctcccatgtgcaggacgggtcacttttttccatttgggaagagaagggtaagaggaacaggatgggactgacactggcatgatgcaatttgtgccgcgttctgactcttgtacctttaagttccaatttggaatcggtttgactttaatttagagatccatgatggtggtgagaatgtccttaatgagcgtcacaagtttaaatggcctttcccagcagacacaggctgtagggctagtgggcacggacagacagatagacacaggaatgttgcataaatagactttatctggtcctcttggctgaagggcagcctttgttcctttttagactttttgtttctgacagttctaattcttattagaacttttgagaaccattactcaaaaacaaaaagcagagggattgctttttgatctgcaaatcaaaagcatgaatttggctaatattgcatttcagtaaagtggcatcattgggtcaagggagagcattatgctgaattttcctgaatgctgaatttttttttatcagttgcctttattattctgtttttaaaagtaaatggacaaattatatgattgtaaacctttcctattcctgtatatgtagatctttatatgtctcaataatatatgtcatcattcatcaaatttatttttcagatgcattttgtcacagatttatgcaatactgtacctattaatttgaatcaaattgatttaaactttaaaacaatagctgtatgactgtttctcttactcaccaaggtgggcttagatttcatgtgcaatcaaggtaaagtcttagtgtagaagttttttttttaataagaaatgagactgtttctgtagcttggaagtgaagatgctaatatttggtctcacaaaattggacataatttaaaacttcaacttgctttcttgcttgttttatttgtaaatattgttcctggctttgagaacttcagagcttttcctattttttttttgtttgcttcacaactccttaggaatgtgaaaatggaaaggtaataaaggaaatcttttcaagttaaaacatgattcataaaggtgacagccatgccatatgtgaagagtgattaacagctgcagagtctgcaaacagctttttaaaaagttcttgataaagcagagtttcccattatttcacgttttggtggttgctcaagtgcatcgccctaattttcctaagcttcattttattctgtagcaatcgaatcactcttcaggtcccagcagtgctatattagggcatgcttaaatatttcatgtatatccctggttattctttcagtgatattttcaatttcatgacaatgatgtggtatattaaagccataatctcctctaaagctgcccattttatttctgcagcatgagtttggataggcagatatgagagcatttccaaggcttgcccatttggaactggtttgctttaatgtagagagttgtgatggtggtggaaatgtgcttaatgaagtgttacaagtttaaatggtctttcctagcagacacaggctgtagagctggtggacacagacagatagacataaagatgaggggtgctaggggaagaaagtccctacttcaaaattcagttgtcattttagcaaaataggttaattctagaaaatgcattttcatgaaactcagttggcaaattaatcaatcaatcactcttttcctgattagcaaacccctgacaacttgctttgcttctcctcaggagtacaggatagtagttttaaaatattgttcatgccacagttcccttggagaaactgctaaaaactatggactctctaaccagaaaaatcaagcccacataattgtgtgcatctgattttgggggtttatggacatccctaaagcatacaccttcttttcccatcaagaactccttcttggtctcagcaatagatgtcttctatgtggcaaaattcttttttaaaaatatatacattaacactcacacactatggcatttctgttagagggaaaagggagcaaatggagacgtcttgggtaggctcttttttaggattgccacaaagagttgtacatttgccaagatttgggcatccaaccttcctgtgttgtctgggggcacactctgagttgagcatctgggtctttaggggtgggtggaggaggagtgatagcagcgcctcagggagttggcagtgagggaggcatggctgtgtgccaatgagtatcctcaaagattctcccctgcccccaccccgtggagcctctgagccctgattccctgatgggctgcccaggaagccggtgggctgagcatgtcatgtgatgccttggcactaataagaggagaaggcctcccgctataactcctgttggagagccagtgacatcccaggcttttgcccaaatgtccttgagttctacaccctgagccttgaaatgcagcttttctggggctgacttcccaggatcggtggtgctgtactttcaggagatggtgtttgctggccagtgaagcacaaaatcagagtgaatgtggttcacatacagctttatgtaggtgcatcaacgagcctggaactaggtgccgggtgccctctaagacaccaagagctattttggaaatagaaagggaacaagtatataaaaatggaagatccagaaatacaagggtaagacttgtcctttattccttcttttcctctttttttccattctccctactcttcttttcatcctttcttccactcctttttaatctttccttccattttcctttccatccttccttccttctattcttctctccttctctttcttcccttctcccatcttctctcactcctcccttctcgtctccactttcttctcttttatcatttcctttcgtcttttcttcctttatatccatctgctcattccttaccgcctttcttcaattcaacagacattttcagttgtttaccatgtactgtttcttattagcttgtgtggaattttgattacttttccttcacaacaggtctaccttctggctaccgagggacatttttgtcctgcattacctttccccagctccttctttcttctttgcttgccttctttagtcatgtgatcggctagcatatattgaacacctaccacatgcaatttgctgccttagagaaaaaaatctaaaatagtgatggacttcactctgaggaaggttaaaattaaatttaagaattgaggtacacacatgtgaaaaggcgataatagtgttatagttacatgatgtcaccaaacaggaatgtgagatgatgcaagacagtgtgaatatgactgctagatggatgaaggagaagccttttgagtcctgagaacggaccaatttgtgagatgggtgggtttgagaaagacttatagagaaggagagtaaactaggtttccaaataggattttaatattcaaagaggagagaaaatttcaatccaggaattgatgtaagtaaaagtgcagtggtctttatttttgttaccccagtttttcaaggtaaagttctaggagaacctgtttttctctctcagggttcctctgacttcttcactcctggacactgccatctcctcttcagtgtcccccaaatgccatttctcttcagctggtgatgggctcaggggagccatctagtctatctcagacccattcttgatcagtagattggtcactttatgttgcaggcaaaaacctgctgacagtggaaagctaagttgaagagagaatgttgaaatataagtcctagatcggtggttgaaattccaaactttgatttttgtaagatctagggtaagccaaagcatgcttctgaggctaatggtctgacacaatggatatctcagagagcctgggagtcaagaatttcgtttggaattcctaggttaagtggtctagtatgattgagttcaatccagggtgtaatacgtggcgtgctagtgaatttttgctttatttgtattgcacagctcaggattgaaagaatcttagaagttatcttgtcttttacatggtccaattatatagtctggaaaagtctccaattttcttactcattgatatgtacatttatttcacctgtgtttttggatgttttcatagcaaatgtatggttataagctgaaaccaattcaaatcatatagtttcaatatccccaatccatgggggatattttcaggtgtctgagaagccccaattcttggtttatgtctgaatcttttatggaaatgacttgcataaaatccagctgagatgctgtgttttcagcctagctgtagaagttgaagattctgtttattccctctgaggctggcatttctctgtgattgttccatttgatcccttcaatggcttagcctcatcagcagcattgcttgggagatataggttgttgaggtccctctgcttgtggccttttgatttttgtcctcgagtaaagaaaacaatccttttatcaaatatttgccagctgcttaggatacacatttcttaattggtacgttttgactgattattgaaaagtttacattctgacatcatatcgtatatgatatatgtgttgggtgtgtgtgtgtgtgagtgtgtatgtctaaggaattagaagagaggactctttttccttctaaggacagcagttgattcttagagtctattggagctttccttcccttcttttatcaggtgaaacttggttgaaagggttaccttctagcagaaaggaagggggaagatatgcctgctggtaaatgtaagcctcactgtaagctctcctagaatgctgttgtcaaaaggaaattttgatattattttatttaactctctgtgttataaataagaaaaacctaagcccagagatgtgcaataatttgagccaataaataagaaaaacctaagcccagagatgtgcaataatttgagccaaattatctttgcagcagattaaagataaaccaggatcagagtataacttctttgactctgaaataattagatgcagagaatctttgtaacctattataaaaatatgttaggcaaagaatgcaatgataaataaattatatatttgagcagcagaataaatcaaacagttttgttccatatttcattggaagtgatttaacagaagtttaaaaagctttaaaaataagagataaaattaattttaagaatacagagatattttacaaaaataataggatccattttaaaatattcttggttaaacaaaagtcaatttttttccacacgactttctcctaacatgatacaatgactttggaagtatataatactaaaataattaaaagctatcctattgctcaaaaacattaaataactattttttgaatgacagaagccaagaacacaatatattagaagacaatagaaatataaccctccttatatacaccatggaatgcaattaaaactataattagactacattttctactcccaaatgtcaatgttaaaaagaacaaagagagagattaaaatagtgtatagaatttaaaacattttaacggaaaaagaaagaaaaagtaaaatggaaataatctggatactgaggaggaaaaaatcaagtggtctaatgaacaaagtcataatttctagcccaagcttgatggtgcctctttctttccctcctcctcctcaggcgaccctagcccttacctcggtcactaggaaagtcagggtgcttgttccctgcccttctcagaaacaggatcttggagagagagagatgaggagtgggggtgggaggagcattcggggggaggagtaggctggcccaggggtcatttgttctacccatgtccccttagggaaggctctgagagggtgctccattcctggctgtaggtatattcccagggccttccagcctgcagctattgaaggaggggctttctttacagagctgcagacatgtcttccaagactcttcactggcagctgccactcttagagcttagctgtgtttaggagccctcaagaaagggtaacattctctacatcatgggagagtggagcaggaggagtttactgataattatgcacaatttggctgagcttcaactcagactttgtttgtttttttccctcctctcagagtcactactgacaaccccaaatacttattgatcacctatattggttgcattatcgtaagcagcattatacagaagttaggaccacaggctctagggctgggatgcctgagtgcaaatctgggatccaccacctctagctgcattgttttgggcaagatatacaaactctttgtgtcccagtgccactatttgtcaatatggaataataataatacgagttcccagctcataggttgttgtgaggttattaaatgagaagggacttaaaacattttgaatagtgcctggcactgaataattattcccaaaatgttagcaattattatattattctaaaatactaggcaaggatgtaataatatgaagaagtataaaatgccatctttactttggaggaattatggtctaatctggggaactgaacattttttaattatgaaaaaaagttgaccttgggttctgataattagcaaatgaagagttgtgatgtctgaagatatatcatcatgacttcctgctgctgtctattggttacggatgagcagaggtttcctgttcccaataaagggtaaagcatgtggtcaatgtaatgtcttccagaccctagccctctgagaaatcttccttgtgttttattcactcctaaaaacaacaacaacaaaaacaaaataaaacttccggttattcaggtttaactcaatgtaattgcctaaataaatacaagatacatgaattctttttattttcttttatttttgagatggagtcttgctctgtcacccaggctggagtgcaatggcgtgatcttggttcactgcaacctccgcctctggggtccaagttattctcctgcctcagcctcctgagtagctgggattacaggcgtccacccctatgcctggctaatttttgtatttttagtagagatggggtttcaccatgttggccaggctggtctcgatctcctgacctcagctgatccacccgcctcagcctcccaaagtgctgggattacaggcatgagccactgtgcccagccaagatacatgaattcttaaatatgccgctgttattaggaccttctctttggtggttgtctttttagtatcctgaagaaatgtaaaggagaccacctgactagcagactcttggtttattaatgtcatagtacttagacagatgccatggaagctagtgttcggatatatcttagaatgaagcatccatgctccaggtaagtcccttttcttactgcattacatcaatcttctcagtttaattttcttgtcagcttaatgatgtcaaggatagaatcagatgaaggacttcccaccattgccatcttacctgctaatttctatttgcccaggagcctcttggtggctttcacaacttgtgtctataagctgagctcaggttctgcccacccacacccagtaccacctagagcaaggatcagcacactgtgaccaaggagccaaatctagtaccacctttttataaagaaggctagctgggtgcagtggctcacacctgtaatcctagcactttggaaggccaaggtggtcagatcagttgaagccaggagtttgagaccaacctggccaacatagtgaaacaccgtctctactaaaattacaaaaattagccaggtgtcgtgacacatgcctgtaattctagctactcaggagtttgaggcaggagaatctcctaaacctgggaggcagagattgcagtgagcggagatcgcaccactgaactccggcctgggtgacagagcgagactgtctaaaaaaaaaaaaaaaacgaaaaagcaaaagaaagctttactggaatacaagggtatagacccatgattttatatattgcctgtggctgcttttgtgctacaatggcaaaattgaatagttgtgacagggaccatatgggccccaaagcctaaaaaatgtactatctgtccctttatagaaaaagtttgctgacctgtgacctaaagattagacatgccagtcccataaaggaacagaaagaagtcttcccaaggcaatacagggggcagaaatcaccaaggttctacagaaaaggaaattcagaatatgaaaggataagataagagtaataaggttgcctgtagaacaaaggggatgatgtgttaactggaacacttttgacacaggctcctgttgcttaagctgtggtatatgtttcttctaatcccaattgaaattgtccttcataatatgatttcatcacagaagtcacatgcagtattacagtagtgaaaaatgttatgagttgctttgaaatgaggccctattctctcatagctattctatgctggctgtttacaatttcagaacaaaactgtcttttggggtttgactttgctttcttaaatgatgattctgaactaggcgattagggtttccccttctccagctactagggcctcctcatttctttgcaggtactaggtttttctgggccaccagctatgtgtgaaatgtctctaaggaatgtacatgtggcaattgtttgccattccctttccatcattaaaagggccacaaggaaaacttagcaacggagtgtgaaatccaagcttttttacaaggaatcctgtgcaagagctcaggagctacttgttttccatatgtagttaatcctgtctgtgcaaagaggttgtcaatctgatcccagttctctgccaactcgtttttgtgattttgagcaaacccctttctaaagcacaagggatctatctactgtgggcctgagctctgggactcttcttctcagcaggctgttcactttggctcaagagtgcctccatccatgtagggtgactttgctaatttgcacaaagtcgccctatgggctagcagcaggcctatcccttcccgtttctgagcttcagtttccccagctaagaaaaacagaggagatggtttccaagctattttctagccttggagctttaatttggaggtcctttgagacagtctgtgcaggttgggtaagcagctgtcttcatgctgtgtggtgctcccctactggggtgcctttgaagctatcaggaaaagccatgtgccaggaagttcttggggtttggaaaaaagggagctcttgagttcccctaaggacaggactctaacaactagaagtaacagcattaaggcagatattggctataaagtgggaggaggggtgtcagaccaaaggcagatgtggctatgtctggcctgattttgctcagctttggagcaatgaagagagtcacggcccctctgactacatgcactgtgagaacatttgcctaagtatcatgtatcgacaatcttttctccctgaccgggccatcactggggttatgcctggccactgaaaatggggacctggacacaagtgtccagatacccaggctgagcaaagcaacaataataaatgtcaattaggtgccctgtgagctgtgagtacatgatggtgaggctcacattgcaggagtcaaggaaccctctaaagaaagaggccacgactcagcattcttgagatttctgtcaaactcaagctaaaatttcctcagattattgaagcgtttggtagatttctcttaaaaaccatattttgttcgtttttcctcccactttgttggaccataataatcagtgcttggttatttgtagctgtgtgtagagagggtgctaaatgctttcttgtcatcccatgtaatttaaacttcacgccaggttaggtgtagctggttctgtctgcatttggccaaagaggaaactgagattcactgaagttaggcaatctgcccaaggccatagagctagaaagttctgcacctaagatttaaactcggaacttatagccaggtgatagtacttttcaaagacacgccccatgcctccctatactaccttgaatgtggctaatttaattgctagtgcaatgaggctgcaggcaaagagggcacttccttatctgtttagagttaacataacccaagggttctcaacttcagcatgattgacattttgggccctagaatcatttgtgtggctatcctgtgcattataggaagtttagtagcatccctgacctttacttacttggtcctaatagcagcttccccatcttttcccaactcagttgttaacaacttaaaatatctccaggctttgccaaatacccccaggggacaaaattagtcctgattaagtgagagttacttacataactaaatgtttacctgccactaaagaagaaatctctgcatacataattttttccactggctcttctttttctcctcttttgtacaaaaattctgttatgaatgacctgggtcattctccctgcctgactgacatcctggagtgtgtcattgaaaaccttcaccttgctggcatcttcccaaatttctcagacaccctctctttgaacctggagcttcctggggaagtattaagagccaaccagctatgaaaacaatgtgctcttccctgtgctaagtgcctcttcttaggcagtaaaatgcttcagtggtatgaacatatggcatcaacatggcctctgaaaaccatgctgggtgtttaacaagcatggagggatggggacaggctgtgatgagctctggaggcttacagaacaggacctcccctcccccaggagcagaggttcctcagggatcttgactccacatagaccaaggctttgtgggaaagagagctagtgccttgaagctattgcatttttttcctttaataaaacaccctgcagaccctgacatatgccacagacagagacagagcagccatgtgacccagtgccagctcttacctctgactccagacaggcattctgctgaagtccaccttctattaggtaagaggatgtgggcagctccgcagtgacccactgcattctgtgtgcataccctccctcctgagggcagggcccatcaactttgagagttataggccaaaataaacagcccggagcattggtcacagagcaggttttaaggctgctcagcagcctggtttaataatcccaggatgcaaaaggctagaaggatcactggcatatttttctagaaaagtggactgcctgtgaatttttataataatgcttagagtgagacatctccttcttgagtgatatcatcaatatgatgtattgataatgaatatttttatgggatttttttaagaaaaaaaaacataagtttttggagctaaataaaaccaccaggaaaaaatcattagaagtttagggagctcttcttcataaaagaatttatgggcatatctgactgaacccatagctgacagtgtaaaatgtacacgtctgtgcacattcatgcccatgtgcacaaatgtgcacatatactcttttcttcatatggaaacatcatggggcttctggccagatgaacctgtttaaattccagctcagtcacttcctgcatgtaaagcatggatgagttgcttaaggtctctgagcttgtttccttgtccttaaaataggaataatagctatattatggcattgtgattaaggttagaaataatgtattagaagttgcaaaacatggaaggtacttgataaatgatattatttttatcaacacaatatcttcatatgaaccttaaataaaacagataccaagtctgctctagaattgatatttttagattactcttcaacagttaggttgttacacctaatatttactccatttcactcgagactgggtgtgggtatttttttcattttgtataccttcattcaatcctcattcaataagaaataataagtcatattccaagaaactgaatcattcccatataacatcttcaagactccagcttttcattcgttccacatttattagcacctactgtgtaccagacactgatctagggactgggaattccacagtgaaaacagagacaaaaccccctgctttccaggaggttacatgcacaatgtattccagccatgcctccaacaaagaaatgtgccattcaaattggagctatccattgtgaacaaactttgtgccacactctgtgctgattgcttagggaagacgggtgcagtgatgaacagaaaccctggaatatggcaatgatggtgggtgtgttgggtaagtgacacatgagcaagtgactgtgagacagaaaatacaaaatcatgacaggtgtcatggcaatccaagaattgatttagaataaatttatgatgaataattcattaaggcttactaaggaaagttgaatacagtgcttggaaacatagcatgtgaatgttttaatgaatgaactgttgaatgaaaaaaaaaaagggctgctgtgtatggttgtgcaggtttcacatggcacaactccaaggcataccatttaaattgtggagatagtcaacgtgcaacttacacgtgcagcaactctgccaaacatttcacacacacgtctcatttaatacttccaacaatttaatacttacgtcgtgttttcttcattttgcaagcatggagttggggattcagtgaggttcataaagtgagtcagtaggggtactcttacttggcatgcagacatgtctgactccagagttgctgcttggagaataggagaaaacagtcccttgaagattaaacttgataatttgagtcacgtctcatctttgaactaaatgcttaggtttctggggtcaaaaagaagtgaagacagggaaatgattacttttccagattttgggcttcaagtcatgaactctgtaagacccttgccctgttttctgttactagaacaacatcatactcttagctcttcttcctcatttcttcaagagaagaatggatcatacattctagaaaaatccacctggtagaggtgccgagcacatcacagtcatcattaacaaaaaataaaggataacagccctggaccagcagaaatgagcagctgtcattgtaggagcttttattatagcagaggctcagcttctcagcaggggaattacatccaactctgatgtgctgtttcttttagaactcatttttgatatcattccattcttgaatcagcagcaaatgagataatacagtatcaggttggtgtcttctcacatctagttaattgtgaaataacaaatcctgctccacactgcccctttgcggtctgggcacgtcatgccccattgtgaccttggaaatccagttacttctgattgctcattgcttctcaaggcaatttatttctcaatcaactttttaacacaacagctcagcccagagaacaacaacaaaaaaaaatggaaagaaaggtttatgtcaggttaaagaaatattgtggataacaatgaacacaattttatagtttcaggcaacagaagatttcgagttgtatgattttggaagaggaatgcagcagacctgatttggaaacatcttgcttgttatgctgtaaacttctctcaaaatgtcacagtctgtagatacttagagagagcctaagttgtaaacaggctttgcttcttctatgctgttcatttttcttaaggcaagcgggggaggagtaagaaagattcctattttcaagttatatgcttgatttcttcgcaatgaccctaagaggaagaaattattatctcaattttattgatgaggaaactgaactcttcagatgtcctatggcccatggtggtgtgtccaggttcttcatctctggattgactcctgcatagccatgctttttccatgatatcatatattttgacagtcagtgaggggccactttccttaaatagaaggaggaacaagttctgtgttagtaatggtaatatcccctgcaggtaaataaaacaacaacaatacgttgagatcagtgagtgattactctttgtcagatggtgtactggatgttatattctcacagaactgcagcaaggaagatgctgttttcctgcccatttgacagctgatgatgttgaagctcagagatgttaataacctccccagggtcatacggctgttaaaagtaccctaatctttgtagtattatgttttgttttctctgttagacttcaaacttccaggaggcaaggactgtttcttattacaattcacccttgaacaatatgggtttgaactgtgagggcttttagaagtggattttttttttcaattaaatgcaggatgcaaaacctgcatatatggagggctgtcttttttatacgtaggttccagaggacccactgggaaacttgggtatgtgtggatttgggtatatgtgggggtcctggaaccaatctcctgaaaatactggggaatgactataatttccttatcctgaaaaccccctgcaaagtggtttccctgtggtaggtccttagtaaacacttgaatagatgaatgtcagctggtcctgaattctgccctccctcatgcttttggtcccttcacacatgttgaccaatcctgtataatcaggtgaacagatggagaaaaaggatgtgttagtagattgttgtcttccttttgtaaagtatagtagcctatagctattatatatatatgatagaaatataaacatatatgtgtgtgtgtgtgtgtgtgtgtgtgtgtgtatatatatatatatatatatatatatatgtaaaaatggcacattcattgttttgttgttttttggtgactattaggataggataggtcatgctaacttgacagataatcccagtggcttaatataattgagtggctctccagggcaattgtcctctggtatgagtggttcaagagactgccttgatctttggctttgccatttcaaaacaaggctttcttcatagtcaccacagagagcaactgggtgctgtttctgttttatacctgtcattgaagagccacacatcagttctggtcacatcttattggctgaaattagtcacatggccccagtagtccactaataaggtggaaaagaggaattatcttttgcgcccagaaggagagaaaaatggatgtaagtgagcccaaaagaatctattctagtggtgttggtcctttattttttttctacctctgagttatagaaaggatttgaggtaatggctatactaacatgagatttcttcagaatagcttcatggtcttgcagttccactgggaatgtgctattacattcgtttccaaatgcttaaccatagtggctcatgtccaactctggctatttgaaatttcttgatgttggttataccagtagctgtagttttttaagggtaacatatttcctgtaaaccatcaggaatgttttagttcaggaaattgtttcattttctttcttaatactgtttcacaggctagcttaacttgagttcttgcttttttttaatgtcagtgtgaaaacctttttcatcagattgttaaaatcttcacaatacaatgctaagtaaacttagcagaatataaaactatatccattatgatcccaaatttctctgtctttctgaaaattgttgtctgcatctttctgtctctgtctctccacatgtacatacacacatatgcagacatacatgcatcctatactggaaattaatacaccaaaatattaatatcagttatctctgagcttaagggttatcttgattttcttctctatatgctttcctaaatttaaaaaatataccgaaaaatgcacttttgttttgcttaggtgtgttataatcagaagatacattttatatagacatagatatagaatggattttttaaagtatctatttttttttgtaattttcacagaagagaattaaatgatgctcattttagattacttacctgctttgttgcctttttgaagccatttagaacttggagacaatgctgacagaagggtgtggagagcaggataggagggagatgccattcagagaggaggagaccatcatttccatcatgaaatccaatttaatcagggtcagccagcccctgcattgctctccccttctactctttcaggttagttaatttgggggcatcttctgatgaatgccatcttgcaattaaaatgctgatgccggcaagtttcagcatctcagcttccatggcccctagctgtcagcagccttgtctttttaatcaggatctatattgctccctcctatcaagtaactttttactttcccagatcccaataaacttggatggagaagagagacatcagctgaattttaatttaatcatttgcttcaggaagcatactaaaaagatggcattatgatggtttgtgtaatataattcaaggacagtgtgcttgttgaggtcttactcccactgactcctcacccattgtagagccagggtgagcagaaggtctgtcacccagaagcaggtggtgaagatggcttttcatagaagtagtagagagagaagggccctcagctgtcaagggcatcacacacctgctctctgaatcatgagaggaaggacatcagaggtctactagactgctcctcaggaataaattatctaggcaaggtcctggggtcagcagagggtgagtagactggtgggggctttgtggaaaagctgattagacctacagcttaaagcctctctgaaaagagagcatcatctaaaataagctgaggagttcctctctgtgacaaataaccctgtcctccctcacttgtccccttaactgcatagttttgctaaagaggcagccatgatgtcatctatgtgatccatgtcaattcacatgcatatgaatgtagtgtgtacattcaatgcatacgcaagccatatcagcttatatctgccaatgatgagcaaacaagcagattgtgtctgtgacaatgtgtttcattcagaactcacagttaattcatttaactctgtttttcttgtaccctaaagtgcatatgaatcatctggagatcttgttaaaatgcaaattctgactcagtaggtctggaatggggcctgagattctgcatttctactcaggttccaggtaatgctgaggctgctgatctaaggaccacactttcagtagtaaggacttaactgacagctgttgtcttcattgggatcatcagcctatcagaagggataggcttggcaaagtttggctttttgatccattcttctatttaaatttttacttattacaaaggatacttgtttaaatatgcactttgatatgtaaataactcttaaaagaattgactcatgggttttttgtttttgtttttgctttttataccaagaacagaaatgtccaaatggacaccatcaactgattttctgtagatgcagatgtaacagaaacacgcctcctcacataaatcctgcgtcatattttcacaaactgcaaacttcctgaggacaagtgtcaatgcttcaggcagacaaatgcttaataaagactttcttgtcattcttcacattcttttagtgctacctttttggataaacttgggaaaaaagaagaaatgtatttgagtaagatgtggcaagaaaaattagagaaaatcctctggaacttcactgccttgtattcttcttgaaatcagagttcaactccttacaagagtttcataaaagtgacaagtcagcaacacattaatgagagccttagttcctgtcactggccttttcttcttctgaggctttctgccaagacatgggtttaatttaatatctccatctctgcagcaattggtctttgacctttgagattattctgaatgccatggtgtactattgagatgataaatggggcacataaggggactcaagtaagcagacatgggggctatcaccatagtgggtgtgggtgccagaggtgatgataagattggcagcctaacagatttttattagctggcgctactgggtctgtgatgatatcatccttcggaaaggagcctgggactcactgggaacaacataacctggttaaggaaaataaaaatgtttggaaaggatcataaataggaaaaaaacacaaaacccctactcaacagcagctgatctagggaagttggaaaagaaattttgttgtatattggttaccagaattaatgtcaaatgatttattacactgagcaaagcttaaaaagctactgtaatttggagggactcagtggatatggattttgaccttaattcagccctttagtctccggatattctccttatttgtggggtggatagaaagagaaaggctgaagggccatcttttattcacctcatgcagacatgaagaatctgtaagaattgttgctttgaatcgaatacttagtatggatggaattctttttttctcctcttcctcttcattttctttctttctttctttctttctttctttctttctttctttctttctttctttctttctttctcttttttctttgtctctttctttctctctctctctctcacaattacaagactcctggcatttcttacagtccataacagcaggctttgagtttttttgtgatgcatttgtatggtccatttgtagccagccagatttcctttatcatttcatttgtcatatattgattgaaacagcaaccttcctgacattatgtactcatcatacttgggtaagagttattctttgccccttcatggaagtgttttattttggttcttctgaattaagattactcataatcctcatctgttcgaataaagtaatcttttggttgacctagctgaccttctgttctctagccagcaaaggaaatcatttgttagtcaggatttcctttaatttgccttgcttttttgatcagtgataatattcagatctttctccttttccctccttgtaactcttgcatctacaatatgaagagtagagagaccaaaattggacattaaaacaacttaaacaactttgttttgacatggtcttgactggttttgttgagggcttgttctgagtggatctaggcaagcttcttaacatttctgtgccttagttttctcatctgtaaaatgtgattgattctagtacacagcccacacgattgacgattgtggatattaagggagatataatgtattatccattttccttcctttttttttttttttaagaaacatggtctcactccattgctcaggctgaagggcaatggtgtgatgatagtgcattgtattattcattttttgatgtctctttaatgtatttaaaatgctactgttttaagacttttgtagttgtttattctgtctgcctgcaatgcttttctcatgatacccaaattgtcagctctctaattcctttgggttttttacccaagaattttcttctcaatgagaatttcccttttctaaaattttgtctcttccttaacactttatggccttcttccttgctttattgtttgtccttaacgtttactagtaactaataaatttgatattttatttatttattatttattttattatttattgtttatcgactgttacttcctctccccacaagtagatcatgaggtcaagaaattttgtgctctgttttattcctagcacctggggataacataaatatttgttaaattaatgcaatgtgcttagcacagcttagcacatagtaagtacttgttaagcaccacattgtgactgggagaacttataacaccttccctccatttagtatctaaattctatagctgaatccaaatttgtctatctttctgggcccattcagcattattcttgacagggtcttccttccttaaatcccatttttatgatagcattatctttttatctatcctatcttgttctctgattagttcatatgagttggtccgatcttcccaactatttttgcaagcttcttgttagcaggaataaatgactcagacttttttttttttgcctatttccttcagtataggggcacagtagatgtacattgaatgttgttgctaaatcaatctgcatcaagaaaatgttaaatgactacaggatttatcatttaattaactagaaaccatataaacaattgaatggaggaaaagaaataatcatttttaatgaaaaacatgcagtaaaatgcatttacctgtgtgaattatttgcccagtacttgtctccatcacattagtatgctctagctgcactagccttcttttcttttccaaagttttactatgaaaaaaatttgaatgtgaaaagtttaaaggattttacagtaatcctttaaaccagtgccagttctaccactaaaattttaaatcaattgctttatcatatcatatatctctccatctacccaccctgttatctattaatccatcatatattttggtgcatttcaaagcaaattgcagacatcaatacatttctccttaattatatcagtatatattgaaatagagcttaatattgcaacaatctttctgattcttttccagcatagaattattttgcctgttttagaacttcatataaatggaaacatatagtatgtactctcttttgcataaggctcattcactaaatagtattcttgagattcatctatgttactgcatgcttattcctttgaattgctagattgtattccatggcatggatgatccccagttagtttgtccttgcaccacttgatggatattataaataaggctgctattcatacacatttgtgtacagaggctatctttttttttttttttttttttttaccttggataaatacctataattgagatttctgagacagagggtgcactgcccttcgtttttctcctcaaacataccaaacttttccctgcattacactactctgcactagttctttcttttgtccggaatgctattttctgtgtatgaaatactattgccccttattatcatgtaactgcctctttcatgcccctcaaatcttagcctcccctgcccacccattctaaagtaatcacagtccctcttaagcatgtgactctgtgttaattagctgcatagcatttctcatcatccggtaattttgttttcactcattataatataagctagagataggacctgtttactactatcgttccataatccaaaatggtatacaatagctagttttaaacagcctagactattctgtggtgaaaaatagcataatatgtagtaggtactcaataatcatgggataaggaagcaaataaagaatgaacaaataaaatctcaatggctaaaaccttacccatcttttcatttctgtatcctcagtacccaacactagtaaatgcccactatgaatttgagagatgaataaataggaacagtttctcagtgggtcagaaacacttaagaaaatgcaactctgaaaaatgttttctttcctgtcttgtcatgtgaaggcagttaatccaattcctcaaacacgttcaatacctgggttaaaatgggtcacagctggggattcgcagcatccatcctacatggcttgatgttcagagagaaattgctagaggcaaactggaaaacatttttaagctcgtgtgaacagactggctcattaatctgctgtttagtggtgctaaaatgtgttcctgtagattagttttctggtagtcattctaattaaggaggtaaggttgaaggaagaaacccttaccttacaggatagttagtacacacgtgggatcagcaattggccatggttttcttgtcttgctcatggattgttatccaggatgcctgcagctgcatcatcaggggatctttgaggttcaagggtaggaaactttagcatttctatgcctttaaaattcctggtgtggtagagagggaaaagagagaaagaatgcctcatgatatctacatccaggtccttcctttctcaatctagctaaatgctatggtttgaatctgtcccccaaagttcatgtgttggaaacttaatccccaatgcaacagtgttgggaggtggggcctaagaagaggtgatgaagtcataagggctctgccctcttcaatggatcaatgtcattatcatggaagcaggcaattataagagagttcagccctcatgaaacagcattttcattatgccactctccgactcaaaaactttctacctttctctgctgcttgcaagatcatgttaacactgcagcctggcattcaagtacctgccaaatctggccgctttgttgccatcaatctaagtttttaaatgttcatacctgtgaccatgctgagcattccacctaaaatgtctttcccatacctataaaaatgttctccatattgcacctaataaaagaagctctggttcttgactacaacaaaagatatgaggctgtacattagttacattaatactaccaatggattcgtgaacctactcttatctgtaaaatatatctctttttctctcttctaggccagccctttcattttattcacataaagaaaaacgaggaacagagaaatttatgggcttgatcaacatcacatagcttccagatagcagagccaggactaaggaaaactaactgaatattagatactgaatccttaagtagaccatttctcaggagtcccctttttgttgctgcttgtagcattaaccgtcttcagctgtgtgaagaccagtctctacagtggggaggagatggaactatttgggctgaagctggcctgcaaaatttgtttctgtgtttaggataacagcagctgttggaatgactgaaaattgaattctggagtggtctgccctttccattattggttacaaatagacttttaatatcctgggaagtaatttagaaagttgcagagatgctgtaatctatgggcctttatatgactataggttatatcaaaactatggtggagagaggaacttttactatacctgagttagggggaggtgtttccagtaataatgcaagtgctagcatttatatggcccctccactccaggcctgttgttatattattatttccatgtaagagttctcagtgttgtccagtcattctcattgatatgtaggtcctcataattcttaaagcagatgttctgtacattttggactgtttcaaaaatgctggtgcaaactttctaggtctcctgaaactctggactgctccatttctggaaagaaaggctctttttcaaagcaatatggccattccctcattatcctctcctaactcagaaatcagaacacgccgtacagaactatgacaatgaaatcccatgagcctgaggattccacagacactatagacctatgctgtagctcataacctgtcaggagaatctgatccaatcacatctggactttgcaactagatgatatctaagtggagggaccagatgagtgctggactgcattaagtaccgtcactgctgctccgctaggcttggtggtgtgaggattttcttctgttcctatcgtggactctctctcccctttctctcttttttttattattttctccattttactctgacattattgagtgtctccttctagttctcatctttctctgccttcactgtgggcaatgactcttttccctcctacttgttgactttttcatctccagcttttctgccttcctgcctgagttcactttatttttaatagagtttctcccctggttctcttctttctcctcctactctccatgttcttccacaatcccccagctataaattacccaaggcatccaaccttttgctctcatggagaaatgaataattaaatctccaaaggaagacacgtggattaaatcaggcacttaatttcttcaaaacacagacagcattttatcgtgtcctgtgcaaatggatgagtcacagccaattacttcaagagggaagaaagctgaggtttggcttgatcaacagcatatatttttttaaatggattgtgctagtgaatgtcagatattgcacaggaatgacacttctaaattcagtagcatgagccatggagtcctaactgtgatgcatgtgatagtgatagagtttactgaccaaggggtgttggtcatttctttgatataatgaaatactgcaagttcggagctcttccttgctaaatatgctgcagtggcaattcatttgttagaaatcatctggttgacaaaccagggaatagagattctcttagggaccacatcgagataatagacttgtgagacttgagtagtaagtgctcagaaagtagtcatcatgtactatgtagatgatttctcaggaataggtagtccatgaaggaggttgggaagattcccatgatgtcaactgctaggcagtcgccaggctaaatggttccctctggctttcttcattttactggctttcaggctttccaagtactggctggtttgctttcagagtggtctcatttcatggtgtcttttctcacactgaggcatcttgctcaggtagtggccgagtaagtacaggtgtcaggatctgctctcatggtcggatgcaatgttttgtgaatggagttcctgaagaaaagtgaagaagcattataaacttggatactgggaagcaaaaggcctccacagaaccttgaaggggggttatcttttagagacacatgagaaaaggcctggatactggagttagaaagaataaacatacacaaacttaaagagataatgataatattatagaaatatctaagtcctggctcaacccatgaaatagctatgtgttggaacttccttaaatgaacaggtgtgtgagtgtgtgagagtgtgtgtgtttgtgtgtgtgaattctgatttgagaacagataaaattaaaactctacagctgggcatggtggctcatgccagcattttgggaggcaggggttggaggatcgcttgagcccaggagtttgggaccagcctgggcaatatagcaagatcccctctctacagaaacaaacaaacaaacaacaagaccctttatgttacctcctagaggtaggagtcaaggaagagaggcaccttaaaagttgaacaggaaagagagcaatacatttttattaaaaaattgtttggcatagcaaggattcaagaccctgtctctaaaaggaaaaaagtatttggaagcatatgcttttggttacttctcttttaacattgattaaatgcttttctgtacaagtgacagtctcattatagaaaaggtttttaaaaatctgttttatccatctccccagtgtatatgctactctaaaagtttacgtcctttgggaggagtaggtgctattttaagtaattacttgctttaatgtattcagaccttagagatggcttcagggcccagtacatagggttctcccaaagaaatacacaaaccttcaaaagaatttaattaatttatgttacctgaactttgaagggctggaagtgaaaaatcacactaacattgcacttctcagactttaatatgcatataaattgaattgcctggagaatttgttaaaatgcagattctccttcagcaggtcttgagcagctgccagatggtgcagctgctcctgctggtccatgaaccttactttgagaagcaagaagctgacatttcaaagtgtaatttcattatacttgaagtttggggttatcttttatttctcttacgtaagtttatattttacaaaatataactaaaaaactcaccttactgatacttttggttggaactgcattgattctacacaatattaaatcttccaatccatgaagttgagttatacatcttcatttgttcaggtctttaatttttctcattagtagtttttacagcatatgaatcttgtacatatcttgctagatgcagactttcatctttcatgctgatctagattttacctagatttagattttacatttctggtgccattataaatagtacttttgcaaaatgcaaattttccattccatagctaatatatagaaatgtcattgatttttgtgtattgtctttctacaatgcaactttgctaagctcacttagttctaatggcctttttgtagacttctaggattttctatgtaaataatcattttatttgaggacagagacagcattgtttcttgtttcttcctaatttgtatgtctttttcttgtatttttgcactagtaaagatctctactccgatattgaatgggactgtcttactggtatttttaaagcttgggatattattccaagcaataattagagaaatgtaaagttagtatcttaaattgagagcattacctattaacacatctttgagtattttttattaatagttacaatggtgcaaaagagaatttttcctgtgggttagaaaactttctagagctcatcttctaccaagggctttgattctgcttctgctgcactttaggatgttggtcttatgcagaacccatgttttcacagacaaagtcatgaaagtgaatgtaagaactttagtttctaaagctatgctttttttttttttttttgccactcctgcacacgaaatcagggtgttttctgcttgagtgacccagagttgaatagttttaagtaataatatttctccatgatcatcttttgctttttcaaaagaatgctagtcaagaaattaagatttcaagtttcctgtatcctctttaaaggtcctgaacctggacagcatttatcaatctacttaacttcacatagcaaaggaattcatcaaaatattcttccttttgaacgttagtgccacttgtgatactttcatgagtgaagtgatagagaacagaacgattttttatggacctaactccttattgcaaggtaatgcaattcttcattctctaggtctgctgaaaagcaagtttgctgaaaagcaaatcatgtgccttatcctccattatctcttcaacctccattatctttgtattagtccattctcatgctgctaataaagacatacccaagactgggtaatttataaaggaaagaggtttaattgactcacagttcagcgtggctaaggaggcctcaggaaacttacaatcatggcagaaggggaagcaaatgtgtccttcacatagcagcaggtagcagaagtgttgagcaaggaaggaaaagcctcttataaagcccttagatctcgtgagaactcactcactatcactagaatggcatgggagtaactgcctccatgattaaattacctcccaccaggtccctctgacaacacatggggattatgggaactacaatttaagatgagatttgggtggggacacagccaaaccatatcattctgcctctggcccctcccaaatcttatgtcctcacatttcaaaacacaatcatgcctttccaacagtcccccatgtcttagctcattccagcattaacccaaaagttcaagtccaaagtctcatctgagataagggaagtcccttccacctatgagcctgtaaaactaaaagcaagttagttacttcctagatacaatggggatacaaacattggaaccattccaaatgggagaaattggccaaaacaaaggggctaccggccccattcaagtccaaaatccaatagggcagtcattaaccttaaaattccgaaatgatcccctttgaccccatgtctcacacccaggtcatactaatggaagaggtgggctcccacagccttgggaagctctgtccctgtggctttgcagggtacagctcccttccagctgctttcacagcttgtgtgtctgaggcttttccagctgcatggtaaaagctgtcagttgatctacaattctggagtcctgatgatggtggccctcttctcacagctccactaggcagagccccactgaggactcagtgtagggattccaaccccacatttcccttccttactgttgtagcagaggttctccatgagggctccacccctgcaggaaacttctgcctagatatccaggcatttccatacctcctttgaaatctaggcagaggtttccaattcttgtcttctgtgcatctgtaggacaaacaccacatggaagctgtgaagtcttggcactttcaccctctgaagccacagcctgacctgtaccttggccccttttagccacagctggagctgaagcagcttggacatggcagggtaccatatcctaaggctgcacagagcaggaggcccagcctaggaaacaatttttccctcctagacctctgggcctgtgatgggaggggttgccatgaaggtctctgacatgccctggagacattttccccattttcttggtgattacttactcaaatttctccagtgggcttgaatttctccccagaaaatggatttttcttttctatcgcattgtcaggttgcaaatcttccaaactttaatgttctgctttctcttgaatgctctgccacttagaaatttcttccactagatatcctaatcatttctctcaagttcaaagttccacagatctctagggcaaggcaaatgctgccagtctctttgctaaagcatagaaagagtcacctatgctccagttcccaacagttcctcatctccattttagaccaccttagcctggatttcattgtccatatcattatcagcattttggttgaaaccattcaacaagtctccaggaagtttcaaactttcccacatcttcctgtcttctgagttctccaattctctaggaagttccaaactttcccacatttttatgtcctcttctgagccctccaaactcttccaacctctgcctgttacccagttccaaagttgcttccatcgttatagccatgccctactccttcagcaccaatttactgtattagtccattctcaaactgctagtaaagacatacgagagactgggtaatttataaaggaaagaggtttaattgactcacagttcggcatggggaaggaggcctcaggaaacttacaatcacggtggaaggggaagcaaacatatttttcttcacgtggcagcagaaaggagaagtgctgaacaaaggggggaaagccccttataaaaccatcagatcttgtgagaattcactgtcacaagaaagcatgggagtaacttcccccgtgattcagttacctcccaccaggtccctcccatgacacatggggattatgggaattataattcaagatgagatttgggtggggacacagccaagccatatgaatcctccctttttccttcaacaatggatatcctggacaaataagttacactaggacagaaaaagaaagggacaccaacgattattccaataaatttttgaagtatacagttccaaatcaggtatttattttattgtaaaagatcaagaaaatgaaaataatccaagtcttttcatattttattctatacgtattatgttgtcaagtcatataacatttgtcttacgtattttattgaatatgtacttgaaatgcttcatacaatataattgttattgtgtttactgggggcagggggtgtttaaaaaaaagaaaaagaaccaaaaacaacatttattctacacataacacacacataaaacatttattccacctctacataacaatagttgtttagacttaggcactaaaaaattggctagaactcaaaactcaactcagtccttgaaccaataattttttagtaaaataacctatagcctgcacaatcataatttagatagtgaaaattattctttcgtaaaactaaacttactgattgtatcttttcttttagagaattaaatatagataaatctttctatcttggagatgtggtcatataagtttacagagacttgtatgacacacaaaatgataaatgaagatacattattttaaatgtctcttctgttttacaaagttaccagtgaaacaatgggcattgcaattcacctgaagagaatgtgggctttggctacaaattcacaataatccattattttcattatgcccatagtccagcaacattccccttccaaatggagcttcctgcctttccttcaatggcttcccagagcccatgcgttacatttaagcctctttagtccagaattctgggcccttcatgcttggttataagcttgctcaccctggtctcaccagaacgttattctcactgtactactacgtgtttcccaaaatctgaaagcaattttgctttttgatatttttgacatggtgttatcttggactggacatgctttctccacccgtaaaatttggatttattcctcacctatcaccacctcaaattacattgttttaataagcgctttcttgtctcccagtgagagaaaatatgtcattcttttggctttcacaaaagttgcttctctctcttttcagcattaatttcattctatcttgaattttctttggttcttctcatatctgttttcctggtagaatacagcaccatgagggtaggactcttggtttacaggttcccaaacttgcgcaattctttggccattgttactgctcaagaagaaatttttaatacatgtatttgtagttaaagcctctgtttactcacctacagtgtttgatgagagcttaatgtttgatattccaaagcggtattttatgcttgaaacaatctatgctacctgaaagcctttaggggcacttagttgacctacagggactccagtaaactctaaactcctatattttcacgttgaatctgatctcaatagccaccaaaaggttttatttcttttagaaggataataatgcaataatgcatccaggtctgcttcttatctcctagaggtcatgttcatcatctgccaccctttgtgtggcacctgagagtcattcagacaggtgggctttgaacacacctttaaaatgcatcactctgagaagtaaaatcagcaatggcaaaacagcagtgcacacaattataagcagtttcctaagcatgtatctctatataacatagtcaactattagtttatgagtcctaaagggaagaaagaggggaaatgcatagaaaagaataatttgtatttaacttttgagctttggggtctttatgtccacagtgaaacataagtgggcctggcattacagtgatccaggtttatgtgaatctagctcttcctcagctatgctgaccatggaaaaagaggtatcattgtcaaacattttttaatttgtggatttatttataaatcttatatttggaaaactatgttaactaaaaaataaatttacataaaattgagattattctggtaagcctggagaatacggaaacaataaggacagtgttcctccccatttttgtgcatgacaccctgatttttacaggtgtgcaagtgagaacactcaaagtcatctttgactcctttgtagtcaatcaactatcaagatttgtctatattcctacatgaatatccgtaaactaggcccatttctgtctccatagctattgccctcatccaagctaatatcatctctcttttggtctactagactgaccctctttctggccgctctccaactggctcaccacaatgcagttagagtgatctttttaaaaatgcaaatctgattatgccactctcctgcttaagccctttcaaaggcttcccattgctcttaagacaaagaccagaatccttaacctggctcatcaagccctgctttctccggcccctatatggatcagtgacctcattgtttactgctaactgtcacttctcactttccaaccatattgaccttctttcaacaactcaacttcaccctgttcttatagcatgtatctcatttgggatgagtaaatatatgtgtgttttatggtctaatatccataaatcctgggggaaggggaacaagcattttccctgacttgttcatgtctgtgtcacctactcatagcacatggcagagactcactatggtatttgtaattaatgaataaatgtatcacactaactatttgccctcagtagactgtggcttcctaaaggaagccaaatgcttattcatggacctaatattcaacagccctgtgcttggcacattataagcactgggtaaacatttatagcaaatcgacttgtaagtcaccctgacactagtctagagccttgagactcaaagtaagatcagatgctatcgagcatcagaattgcttgggaacgtgttagaaatctagaccatcagaacctacatgggttctgcatttttcccccagtttcactattttgttgtgtaaagtatactaatctaaaagtgtacaacttggctgggcatggtgcctggtatttattctaatcccagcactttgggaggccaaggggggtggatcacgtgaggtcaggagttcgagaccagcctggccaacatggtgaagccctgtctctactaaaaatacaaaaaattagctgggtgtggtggtgcatgcctgtaatcccagctactcaggaggctgaggcaggagaatcgcttgaacctgggagacggaggttacagtgagctgagatcatgccattgccctgcagcctgtgtgacaagagccaaactctgtctcaaaaaaaaaaaaaaaatctgtacaacttaatttgtaaagtgtactaacctaaagtgtactacttattgtgtcaattttgttaccttttcccacatcaaatgtagaacatttccagcaccaaagaggttttccttcttcttttcagtcaatactctcccagaggcaaccactggttttacttctactatcgttaattagcttattagcttttcatgttcttgaacttacaaaataccactattttttacttaatattttcagagtctgaattttcacaaatcacccacaaatcacacatttgaatatgtgcacattcaaatttgagaagtgtttttatggagcattcattctcactgctggctgcacattgatatcaactgatgcctaagtaccacttccagagattctgatttaattggccttgagtgaggactggacatcaggactttttgaaaattcttaggggattgtaatatgcagctgaaatttaaaaacactgttctgtctatccttaagttctttgtttttttttttttgtttgtttgtttttgtttttttttgttttttttttttgagaccgagtctcgctctgtcgcccaggctggagtgcagtggcgcaatcttggctcactgcaacctccgcctcccggcttctaattttttatatttttagtagagactgggtttcaccatgttagctaggatggtctcgaacttctaacctcgtgatccgcctgcctggcctcccaaagtgctgggattacaggcgtgagccaccgggcccagcctccttaagttctatgttgcacaattcctcctgtctctgatccatgctaggagagaacagtcgttacctctcagaataaagcagatcttgcctagagcagatttgcctgcttttttgtttgtttgctgcttttctcatctcttatcttccctagaacctaaaggagatgcacttaagccattaggttgttgctctcatcatcctgtgggaacagtggtgtgctagagctgacccatactggcttgtgagggcagattgtgtgcttccaactatatacaatgtcattcaaattattcaatgacatcatgttggtagcttgaacttggccatggtgggaatatttacacaacagaaattggcaaacactaccaatcaggttctgtttcctccctgacttcctcctagagagctggtttgccattacacaccccctataggtaaatactgctaaggagaagggcttaatctggttaaagcagttgtaaaatgatctttcagtagtcttctcaagcgatgacttttcctaacctcaaatttaccatttagcagttactaatatgtttaaataatgttttcaatgcatctactcctttgggaaatataaaaagatggatataattatcgtatttcttccatccatcttggttgaaaacccttagaattatttccaatagtcactattgtctgatcttgtttaggccatcatcccattatgctaagtccatgggcaaacataacaggatgatggcctaaacaagaccagacaattatcccatcatcagtgttgtgctcagtacatggactaggtagcagaaatcagtgatagcttttattacagcatctcacttaaggtttttcattgaatatagtattcccttggagttgatgggcatatgacttaattggtttcaattggtcattgaattccactgattacgaagtgatccaatatattttttattttgtatataaacctgtggggcagcactgaaaaagaacttatgattctcagtgtttaaaataagatctggagtcagataaacctgtttttgaatcttggctcttctactcctatttgggcaatcataggcaaattataatgtctgtaagttccatgtttctcatctttaaaatgggtattaaaaatagcttgcaggattatcctgaggattaattaacataaaacagaaatgcactaagcttctaacatgatgcatagtaaaacacttaatatctttggttgggtccccaggagcagactccaagacaaggatttgggtgcaagtagtttgagaggttgttatagactgatgtgtccctttcaaaaaactgatatgttgaaatcttaatccccaatgtgatggtattagaaggtaggaactttgggaggtaatttaggtgatgagggtagagtcttcatgaatgggattagtgcccttacaaaagacaacttagagggctctctaactctttctgtcatgtgaggacacaatgagaagttgacactctgcaacttggaagggagccctcacaatgctggcatcctgatcgcagactctcagtatccagaactttgagaagtaaatttctgttgtttataagtcatgcagtctatggtaatttgtcatagcagcccaatataagacagaggtcaccccaggaaatactggtagtagatggagaagtcagacaagaaagagaagaaagccaacaaggagtggattaccacacacatttgcattgtgagtaattggagcttaatcttactggggaactctgagaaccaatgtggaagatagacctcagaggtatctccctagaagacagaagaaactgaggtattaatctaccaactcctatcagtcatcaattcttaattctctggcactacaaccttccatgtatatgagcagagaaggatccagtgaccagaacaagcccttaaggaaagtgatgtaggtgatacagttggaagatgggccagcatatgcaaaaatcgttcagggaaaaagggacataggcaggcactgatatctatagtagctcaataaacacttgatagcagtagctatatatgggagggttttcatgccagaagcttgtttacacatcaactactttgatagaggtgggggagaagagttaaagcagcattagttcatctcctaaggtttgtcccagctctaatatttacaaatatctcatggtgtatttctttctgtatgcacaagcactgctctttttggtgaattaaaatcacaagaaacccttatgcagttttacttttaataatgggaaacggtactgttgtaaccattaaattctaatatgataaaagataagtttatctagaggcagtgcagttcagtgtaaagaccacaggatgaagagttaggagatctttgtggagtctttactcagtcacttaccatttgtgtggcctcttaaaggagtaaaaatctacaagtctcaactgaaaggaaaacattacctgcctagctaatgtgttatagtgagagcacatggaacaatgctttgaagaggagttgtctcagatgctgagctctacataggagcagtcaagttttctaccagtcagaagggcaaaatgcttctggttgcttttggcaggagtactgaattcactgtaaggcttgatgattaccttgtgcttctcccatatccacagcactgaagtaatttgtgatttgaagacacagtgactctcttggggcacattagacacatagatgtaaatcaattgattccaaggattctgtgcagctgttgtcttcgatggatatagtggctgcaactgcctgtttcagtttcctcctggaaaactcttgatatcagtctctgacatcttggagtatttctttggctccacagacattaaggaaaatcatctatagaaaatatttatataattttatctttgcttgttctcaaatccaagggatgatcatgccaaaattttaggagtgaaatatgtctttgcccacagtgtgcctaccactttataaattatacccttatacaaagtattggttttgaattttggaactaattataactaggtaaatgcttaactggaagactttggaatttcatgaaatcagtgcctttaaagttatgcactttaaagagatctttttgtattaattaggatatccagtaagtctttttgtgcagctccacgtcgtagcaaggaatttataatatgtatgtattttaaagatgcatgtggcattctagcaattacacagtctcagtgtgatataagtgtaaattagtcttaccagattctgtatttaaaattgtagtgtaaaactatatacattttaagggtgaatcctactgttagagaaaaataattgcatcaattttcaataaactttgacaaatatggaattaatctaagttaactactaagaccctaaacttaagtacctgagaacttagatatttacaaggtaatggttattaatcagaaagcctaaaacttataaaaatatcattcagtattagtgttcttatagtattttctagtttcaatttttagacaaaaattttggtaacataatttggaaaataaaaatgatgaagtaattaaatgtactaaaagataattgtctcatctttttttctttaaagattttgtttgctcatgtcaatgttatctatcactttaatagaagcataaactttagagcatccatgatgataatgtaggcagaatatttttagatagtatttcatatatatgtaatttattgtaagccaatttaaagtttccttattataagccaatttaaagtatttcatatatatgtaatttattataagccaatttaaagtttccaattaaagtgaaatatatttcacacacataataaaataaatcttgatctttctaaaaaaatcaatatgtactttcttatgtgtaaacaaaaaaattcatgcaagtaaatcacaataatataccaccaatgactctggcaataaagcacacaaataataaagtaaaagttatgaccttccattaaccgtaaacactaatcctggtaaaggggatgagaaattgtttataataactcagcacataataactgcatttgagaaaccaattactgcttttatatggcttcagtttctcagtctagcacttcatttttgcaataaaggacctgagtacatttgcatccagtgcacaaaaggtgtgcaatgaataactgcagtttaattgggctcttaagaattctgatatcttcattaacttatttcatgacaaatgtatttatatctttgcaactgtttttactgaattatatacataaattttttaaccagtttaaaatggctcatctgttaagagatctgaatgcataaagttttagtagtaagacaatttatcttgataaatgaagtcaagcaatgtagatttagcaaggttccagagctttcagtgatcatacagtggacctttaaagaaacataaaaagaagaggttcgatcataatggcagaagggaggcaggactagattgcagctctggacagagcagtgtgcgggggctcatattgtgagttttagctccaaattgactgcaagaacaaaccagcgatccccagaggacccacagaccctctgaagaaaggggtctgctcctgcaggacctgggagacatccccaaaactgtgagtgatccaagtgggaaagggagaccctcctctcccaaacacacactcctactggagaagctgaaggtctgtttgtgggagaagtttccgactttacttggagctgagtcaatttggagagctgagtgaaatacaggggtagaggaagcagcagaaaggccctgggagcttgctgggtctcctagcaggccactcctgcctggcaccacagtgatccaacgcgagatgagcactgggtaaaactacacggggagaagcatatctatagctcaactttgtaacaatttgaactggatgagaagccttctggccagaactcgggggagggcacaaatctggtgtgcaggctccacaggcaggggaagaaccaagccctttggagtgagactggctcttcagtttgtgtgggagctgggtgaagcctgtgactgccagctttcccccacttccctgacaacctgcgtgactcagaagaggcggccataatccgcctacatacacaactccagtgacttgggaatctcacccccattccccacagcagctgcaggaagacctgcccaaggagagtctgagctcaaacatgcctagccccacccccacctgatggtccttccctacccaccctggtagcagaagacaaagggcatataatcttgggagttctagggccccacccaccaccggttcctccccattctaccacagctgatgctctctggaaagcgccacctcctgacaggaggccaaccagcacaaaaataaagcattgaaccaccaaagctaagaaccctcacagagtccattgcatcccccaccacctccactggaacaggctctggtatccaccactgagagacccatagacggttcacatcacaaaactctgtgcagacaacccccagtaccagctcaaaactgggtagacttgctgggtggctagacccagaagagagacaacaatcactgcagtttggctcacaggaagccgcatccataggaaaagggggagagtactacaacaagggaacatcatgtgggacaaaagaatctgaagaacagccttcatccctagaccttccctctgacagagcctacccaaatgagaaggaaccagaaaaccgtggtaatatgacaaaacaagactcatgaacacccccaaaaatcacactagttcaccagcaatggaaccaaaccaagaagaaatccctgattaacctgaaaaagaattcaggaggttagttattaagctaatcagggagggaccagagacaggtgaagcccagtgcaaggagatccaaaaaatgatacaagaagtgaagggagaaatattcaatgaaatagataggttaaagaaaaaacaatacaaaattcaggaactttgagcacacttttagaaatgtgaaatgctctggaaagtctcagcaatagaattgaacaagtagaagaaaaaaatttagagctcaaagacaaggtcttcaaattaacccaatccaacaaagacaaagaaaaaagaataagaaaatatgaacaaaacctccaggaagtctgggattatgttaaacaatcaaacctaagaataattggtgttcctgaggaagaagagaaatctaaaagcttggaaaacatatttgggggactaatagaagaaagcttccctggccttgctagagatctagacatccaaataaaagaagcaaaaagaacacctgggaaattcatccaaaaagatattcacctaggcacattttcatcaggttatccaaagttaagatgaaggaaagaattttaagagctgtgagagagaaggaccaggtaacatgtaaaggaaaacctttcagattaacagcaaatttctcagcagaaaccatacaagccagaagggattgaggccctatcttctgcctcctcaaacaaaacaattatcagccaagaattttgtatccagcaaaactaagcatcatatatgaaggaaaaatatagtctttttcagacagacaaatgctgagagaattcaccattaccaagccacccctacaagaactgctaaaagagctctaaatcttaaaacaaatcctggaaacacatcacaacagagtctctttaaagcataaatcacacaggacctataaaacaaaaatacaagttaaaaaggaaaaaaaaaactcaagatacatgggcaacaaacagcatgatgaatgcaatggtacctcacatttcaatactaacattagatgtaaatggcctaaatgctccacttaaaagatgcagagctgcagaatggataaaaagtcacgaaccaaccatctgctgccttcaggagactcacctaacatataaggcctcacataagtttaaagtaaaggggtggaaaaaggcatttcatgcaaatggacaccaaaagcgagcaggagtagctattttatcagacaaaacaaacttgaaagcaacagcacttaaaagagatgaagagggacattacataatggtaaaagccttgtccaacaggaaaatatcacaatcctaaacagatatgcacctaacactggagcacccacatttagaaaacaattactaatagacctaggaaatgagatagacagcaacacaatagtagtgggaaactttaagactccactgacagcattagacatgtcatcaagacaaagtcaacaaagaaacgatttaaactatatggaacaaatggacttatagatagacatatacagaacatttcatccaacgactgcagaatacacattccattcaacagtgagtagaactttctctaagacagaccatatgaaaggccataaaataaacctcaataaattaaaaaaattgaaattatatcaagcactctctcagaccacagtggaataaaactggaaatcaactccaaaaggaactttcaaaaccatgcaaatacttggaaattaaataacctgctcctgaatgagcattggatcaaaaacaaaattaagatgaaaactaaaaaattcttcaaactgaacaacaataatgacaatctgtcaaaacctctgggatacagcaaaggcagtgctaagaggaaagttcatagccctaaaggcctacatcaaaaagaattaaagagcacagaccgacactgtaaggtcatacctcaaggggctagaaaaacaggaacaaaccaaacccaaacccagcagaagaaagaaaataaccaagatcagagcagaactaaatgaaattgaaacaaaaaaatacaaaaggtaaatgaaacaaaaagctggttctttaacaagagatataaaattgatagaccattggcaagattaaccaagaaaagaggagagtggataaagaaactgtggcatatatatatatatatatttatatatatttatatttatataaataaatatatataaatatataaatatatataaatatatataaatatataaatatatataaatatatatataaatatatataaatatataaatatatatatacatatatataaatatatatataaatatataaatatataaatatatatataaatatatataaatctatataaatatataaatatatataaatatataaatatatataaatatatataaatatataaatatatataaatatatataaaatatatataaatatatatatttatataaatatatataaatatgtaaatttattatatatattatatataataattataaatatattatatatatttacatatttatatatatttatatattttatatatatttatataaatatatatatttatatatattttatatatatttatatatatatttatatatatttatatatatttatatatatttatatatatctatgatggaatactatgcagccataaaaaaggaatgaattaatagcatttgcagtgacctggatgagattaaaggctattattctaagtgaaataactcaggaatggaaaaccaaacatcgtatgttctcactgatatgtgggagcaaagctatgaggatgcaaaggcataagaatgacacagtggactttggggacctaggaggaagagtgggagggggatgagggataaaagactacaaatatggtgcagtgtatactgcttgggtgatgggtgcaccaaaatctcacaaatcactaaagaacttactcatgtagccaaatatcacctgtacccctgtaacttatgaaaaaatatttttaataaaaatctttaatgatgtaggaaaatttttaaaaaaagaaccgcatagaggagatgcttgaaactgaataccatagcagtggtttctattgtatgtgtttgtgtttgggtgtatatgtatgtgcgtgtgtgtgtgtttgcatggtatgggaggtggctagatagtttcttttttgggtgattgtcaaatgtaaattcactgaattttaagcataggatgcaacttcagttgtaggctctaattgaggtatgagtgtctcttatcctgtgctacttttcacaaccctgaaaggagaaggtgctgtcatagctaattattactgtatcttgtttattactgtgacaacaaaatggtgtcttgcttggactaatcatcaactatgtggtaacttggtccactttgaaacaatttaagtgcaactttggagccctctcactgtgtctcctttaccctttagctccaagatgcttgaatattgttgctcagaagaattagttaatatttgattttcatctttacaaagactcttaggaaaaagaatgaggaagttttacttaaagtgggtttattaagaatgataatgtggctgggctcagtggctcatgcctgtaatcccagcactttgggaggctgaggcgggcagatcacgaggtcaggagttcgagaccagcctgaccaacatgatgaaatcccatctctactaaaaatacaaaaattagccggacatggtggtgtgtgcctgtaatcccagctactcaggaggctgaggcaggagaatcgcttgaaccctggaggcagagattgcaatgagccaagattgtgccactccactccagcctgggtgacacggtgagactctgtctcaaaaaaagaaaaaaaaaaaagaatgataatgttgttcctttatcacttattaattttttttagtgtttggtgtttttagtgttaactgtttatccctttcagatatgtaaaagccaactgccaaatactttccagtcgttatacaatcaggtcatttcctttggctttaactcagaagtaatttccttgatctttttttatgatttctccccctgagcttcccttaattgcttttcctcttgtgtgttgatgctagatgtaatattctgacatacaccccaggagaaggcttgttttctctttccttctattctcctcctcttctactttttaaaatcttcactctctttaaaataataaaaaccaaagtctttttcttttagagcatctcagacccaaattgccacatagtggtcttataaagggaaaagagctttggtgaactttatcaaagtttttgttgctgttgtgttttcatttgtttgtttgtttttatatgaagcaaacttattttttaattggaaaaataagccatggtctaagtattaaaaaaaaaattaaaccctacaaaagtaagtctcactcctagcccaggcttctgaccctagccttctttcccatatacaatcattaataccactgtgacccttctagaaacactttaaggtagaatgttttacaggaggttgagggagggagaaaagaatgagagtgcattctttaaaaaaaaaaaaaaaaccaacaatattgacagattattaagttttaaaaaaagtcctatagtttttttttaaatatcagcatccataagtctactttaatctttgtcacaactgcatagtatggatatgttatctattttaccgcaccgtatcagaggacatttaaattatttaatttattgtttattatgtttgtttatttcactgttacaagccatgatgtgatggtcatccttatttgcatgtcatttcctcataacctgatatatttgttggataagttctgcgtacactaggcatacatatctatgcatgcatatatatgtttatgattcgaatacacaaacagaagtgctaagaacttcagcctatactctgatttccctaccttacaaagtcccttaggatagcaactggtacaaaattacctgattcttttcagggtcacctttcatttccctccataggtgtaaatgtcacggtgtttatttctgcagtgtaggcattcagggcctgcagaagcagtgtgggtagatttccctggatatgaggtgaactatgctgaagaagttagagccagctgcactcagggcttgtcatagttttagaatgttttcatagaagcctaggctgatagcaatgggagaagcctcgggtaaatgaatccaatcctccccattcccaaagtagaaggactaggcagctaggagaagtcattctcatgcccaggtaactcactcaagttgccaaccggggtttttctatcacaccatgaaaacctgtgcttctgtcctatattgcctggaggctgactttcttatcgcttcctgtttctcctcatgactttgactgggttctcttaacttgcaggcttagtgttgaaagggacatttaaaagccccagaacctagttaaaatttgacaggcggttctctcttgcaggataggttttgccaactcccctgaggctgcaatctcaatttgatgacggttttaaagccattgttaaaaatgaataatacgaattttgaaaaaaatttgatggttctctgtctttatttctctttacttatttatttatttgatttttgagacagggtctggctctgtcacccagcctggagtgcaggggtgcaatctccgctcatgggaacctccacctcccaggctcaagccatcctcccccctcagcctcccgagcagctgggactacaggtgtgcaccaccacgccgggctaatttttgtactgtttgtagagacagggttttgccatgttgcccaggctggtctcgaactcctgagctcaagcaatccacctgccttagcctcccaaagtgctaggattacatacgtgagccactgggcccagcccatctctttttctttaatcccttttgaacagtctgaggtggcaagagaaacaatgggcagataggcttggccctgttcacagagtatgggaggcagggaggagcaagcagagacttttctgtgaatggtaaccttaatgaatcagatcacatttgagttggcccttttctcattacaggcagagaaggtagatgctgcttggtatcttttctcagctgaatttacttccagacaagcaggtcatctgttagagtcatttaagctgagtgtgctatgacaaggagagttgggaagtcagtacatatgtgcatgcatgtattaggtgtgtgtatgtgcacattgtatgtatatacatgtgcattcactgtagatgcgtatatacatacatgcacatgtgtgtatagatgcaggcatatgcacataacacatatgtacacatatatgtgcacaagacattttacaattaccattgtgaaggaaaatagaaattaaggactttcattaacctcttccagggagagaaaaaagaaactaatgtattaagacctgagaacagaaagttctgacaaaagcaagagtgtttccctttttagaatgaaaagtctctggtaggacagattctgtccaaatacctcctttctaccacaaacaggattttaatgacagcccttcccttgtaaatttacatggaggtatctctattgactctcgttgccatggtgattcaaagaaactggtctgggactgcagtttgggataacatttttcaaatagggtaaggagcccaggaatgcagactttgtggcttgacaatctgctctattcttagggtaaaaaataacgttacgcttggcaaaccaattatgtttttgacaagataaatgcttttgacgttattcctattcttcctgggtaatagttaagtagataaacaaattaaattgaccttagagataaaaattcatgcccattcttccactgctataactgttcaaaacattctttccagatttctttggaatggatacattttgatgtgggagaagtcattcagtatactgagttgaaaacattaatactggtatcaaattgcctgggtttgaataccagctctgccaccagctctgctgggagaccttgaaaaaattacttaaactttttgattctcagcttccttgtttgccaatggagatgataatagtatctatcattaaaagctgtgctgaagaataagttaatcaatatatgtaaggcacttagaatcatgcctgatccatatcagaggctatagaaatatcagatatcatcatcatcacatatttctattattattattactacattgattcttcttgggaaaaaattgacattttttttgcaccctacatagatggactctggggagaagaaacagtccatagaacagaggcttggtagaactttgaaatgacaggaattctttcaagatcacctaaaaatctttttgaacacagctgaaaatctccagcctttcttttcttcctttaaactcaggtttcattatcttttaagatggctatgataccacagatccgttgtacaaaatgacttttttccaggtcaccacacacactgtgagtttatgctaaatcccactctgctgttacaaccagttgggatttttagggccaaaaaggtgagttaaggggtgtatgtacattgatgaaataaaaggtgagacttaagctagttgtagacctttgtatgctccaattcttttaaaaaaatatatgagaaagctgggacttcagagaaagattaggagtaaaaccgattgtattagtgctttgttgccacgctttgagacttgtgatttcagaatggcagatctgagataagttcactgggaacatctggtccagccttcccatttatggaggaggaagtagaatcctagaaacatgagtagcttgcctgaggtcagctagggagggaagaacaaatgcaggatgagagcctagatcacttctggcccagttcagagctaccttaaaaatagagccatttagagctctgtaccatatggccttctccctttgtgtcttcaactaggtcctgttgtgagctgtaggaatgggttttttagccccttgacactgttgaatgattcttctcggatgtgaggggcaccgtttgttccatgagagcagcagcttccttgggggcccgatgtttttcttttgaaattccaacaggaaagaccagaattccatgttcccaataatgccatctgtttatttgaaaggggacaaaagatcactggggattggcatttgttctagctctctgcactttacctcatacaaagaaactctgcttgtaagtgctatgatgaggctccaagttggctagctgaacttgaggaattcatcgggcagagaactatagactttcagtcatacagaagtatgtacttgttgctgccagtgagacctttgtgcgccaagggagtgttgatgtgtaacccttagtattttcattggcttcagcgtctctgaaagaacagcatttactgtcttctgagaagataggtatttctttttgttgatttttctttttttttccctctctctctaaaggatagaagataagaagttttataatcctaatcctgacactcagttgccatgaacattttcttctcttaaatgtatgtcctttgccattctctcatttacccactcatccaacagttctttctgtaaacattcattaaacacctaccaagtgccagacactgagctaaatgcaagagaaacaaaggcaaatcatatgtaagtctgaaggaacaaggggagagggaaattgttgggactagagaaaatagctgtcattctagaggggcatgcctgcctggggctgtggccttagctcagctacaggaatgggatcaactacagtgacttggaagctgaagggcaatggtcttgctcactctcctgttggtctttgcttccctgccagtgtcccccattgactgcccccagatggaaacctaagggcaaggtacccttagagaccagacttccagggaatatagcaaaggtagagagtgcaactgaagggccaagaaaaatattgagcacagtaaagttttgtaaatgagttcagataaccctctggggcaaaaaggaaggcatttaaacttgtaaaggaattactttttgcttgttaaatgttaacgtagtgactggagtttttggacctaatgatatcttagggaatcagagaagcgttgaagagattgtggttctatggtataaaaaagatagttccaaatgtttgctggtactctcattgagacatggaattaccgttccttctgtgagagctggatgccttttactggtcttctttgactggtgaaattcagtagaagtgatgttctaggacttacaagtctaggtcataagaagtcttgcatattatgtgttagaacattctctctgggaactttaacctttgacccaccctgtaagaaatctaactaccctgaaactaccgtgtcagcactccagttaacagacccagctgagctctgccttctagatgttgtccccacggcgtcagacatgtgactgtaaccatcttggactctttagatctttctagctgccagatgaacaccgctgagtgacctcatctatgccatatggaacagaagaatcatctagcagatgatctagtgatctgagaattgatccttctcaaattcctggcctacaaaaattatgagataaaattaaatggtttttgttttaacccactacgttttggggcagtttgttaggcagcaacagataattgggaaatgctgctaccctctcagattgatgatccgttcattctatatctacattaataatgggaagtaacaacaatcctccactaacccctacacatacatatattcacaatacaactttaaccttccatttctatgataagtgatctagctagatcatgaaatctaatgtgaagctgtttaactctggaggtattttgatatatggaagtggaaaaagtgataaaaagcagtagctctagaggacctagaaagtgcagcataaggaaagattataaaccccatccccttaaattgcctttaaataaaagtttaatttaaaaaaactatataaattatatgcttcttgcccaaatgccccatcaaggaaacaaactcattcatgtcagaacaaactttgggattagaccaatttctaagaaaaaaatgcaagagggaaatgtgcagctaatgagacttaatggggaaaaagagctaatatttattaagcactgtattggtcagcatacactggattatatcactgtaacaaataagctccaaatctcagtgacttgtacaagaaaagctcatgtcttgctttggctacaggtcaaagttaggttggtatctgtgtgggggttggtgtgtcttcactcactgaagttatgcagagacacagataagtgaagcttcatctcaacatgtgattccactatctctagagcattagaaaagggaaatggcagctcatatactgattctcaaagtgaaacagatgactcgtatttccatttcactggccaaagcaagtcatatggctctatacccaaatttcagagggcagggaagtttgactggaagaggacagagctggaaatccttcgtaaacagcaccaattatgaacacaagcatctgttatggagcagacactttgctaggcatgtctcattcaattctgacaaaatccattatataggtagaagacaggcctacagaggtcaagcaccttgtctgtggttacacagctggtaattgaggaggagagcctggaactgaggtccttaggtctgatttcaaagtgcatgcttttgttttgttttgttttatttgacatgatgctcaccaagcatatacatgtcatttaggaactagagaggacagtgaagagaatttaataattttatttgtattttggagtcactttaatctataaagcaccctgctgccccttagacctgtgctctgaagtgcaccaagatggttggtaagttaccgagtctccactgtgttgagagcactgttcttagtcagtgagaagaaagaaaaaaaatcagaaaacagcctcaagtgtccttgagagtttattatatgctaaaaattaagagacaaatatcctttacaaaaggcttacatatacttaaagagcctacttacagattaatacatatgcatctcttaagcttgaacaaggtgttttattagattggtgcaaaagtaattgtagtttttgccattacttttttttttaatattttaagttctgggatacatgtgcagaacatgcaggtttgttacataggtatacatgtgccatggtggtttgctgcacccatcaacccgtcagctaggttttaagacccgcatgcattaggtatttgccctaatgctctccctccccttgcccccaactccctgacaggccctggtgtgtgatgttccccttcctgtgtccatgtgttctcattgttcaactcccacttatgagtgagaacatgcagtgtttggtttcctgttcctgtgttagtttgctgagaattgtggtttcaagcttcatccatgtccctgcaaaggatatgaactcatacttttttatggcatcatagtattccatggtgtatatgtgccacattttctttatccagtctatcatcgatgggcatttgggttggctccaagtatttgctattgtgaatagtgctgcaataaacatatgtgtgcatgttctttatagtggaatgatttataatcctttgggtatatacccagtaattggattgctgggtgaaatgctatttctggttctagatcctggaggaattgccacactgtcttccacaatggttgaactaatttacactcccaccaacagtgtaaaaaagtgttcctatttctccacatcctctccagcagctgttgtttcctgactttttaatgattgccattctaactggcatgagatggtatgtcattgtggttttgatttgcattgctctaatgaccagtgatgatgagctttttttcaaatgtttgttggtcgcataaatgtcttcttttaaagaagtgtctgttcatatcctttgcccactttcgatgggattgtttctttcttgtaaatttgtttaagttcctcatagattctggatattagacctttgtcagatggagagattgcaaacattttctcccattctgtaggttgcatgttcactgtgatgacagtttcttttgctgtgcagaagctctttagtttagttagatcccatttgtcaattttggcctttgttgtaattgcttttggtgttttagtcatgaagtctttgcccatgcctatgtcttgaatggtagtgcctaggatatcttctagggtttttatggttttaggttttatatttaagtcattaatccattatgagttaatttttgtataaggtgtaaggaaggggtccagtttcagttttctgaatatcactagccagttttcccaataccatttattaaatagggaatcatttgcccattgcttgtttttgtcaggtttgtcaaagatcagatggttgtagatgtgtggtgttatttctgaggccgctgttctgttccgttggtctatatatgtgttttggtaccattaccatgctgttttggttactgtatgcttgtagtgtagtttgaagtgaggtagcatgatgcctccagctttgttctttttgctttggattgtcttggctatacaagctcttttttggttccacatgaaattttaaagtagtttttttctacttatgtgaagaaagtcaaggtagcttgatggaaacagcattgaatctataaattactttgggcaatatggccattttcacgatattgatttttccggtctatgagcatggaatattttttctatttgtttgtgtcttctcttatttccttgagcagtggttccttcaaggagcctcttgtaaattgtattcctaggtattttattttatttgtagcaattgtgaatgggagttcactcatgatttgtctctgtgtttgtctattattggtgtataggaatgcttgtgatttttgctcactgattttgtatcctgagactttgctgaagttgcttatcacctttaggagttttggagctgagatgatggggttttctaaatacacaatcatgtcatctgcaaacagcaacaatttgacttcctttcttcctatttaaataccctttatttctttctcttgcctgattgccctggccagaacttccaacactatgttgaaaaggagtggtgagagagggcatccttgtcttgtgccagttttcaagggaatgcttccagtttttgcccattcagtatgatattggctgtgggcttgtcataaatagctcttattatttttagatatgttccatcaatacctagtttattgagtgtttttagcatgaaagtgtgttgaattttattgaaggccttttctgcatctattgagataatcatgtggtttttgtcattggttctatttatgtgatggattatgtttattgatttgtgtatgttgaaccagccttgcatcccagggatgaagctgacttgatcgtggtggataagctttttgatgtgctgctggattcagcttgctagcattttattgaggatttttgcattgttgttcatcagggatattggcctgaaattttctttgttgtgtctctgccagattttggtatcaggatgatgctggcctcataaaatgagttagggaggtgtcctttctctattgtttggaatagcttcagaaggaaaggtaccagctctgctttgaacctctggtagagtccagctgtgaatctgtctggtcttgggctttttttgtttgtttgtttggtagtctattaattactgcctcaatttcagaactcattattggtctattctgggattcgacttcttcctggtttagtcttgggatggtgtatgtgtccaggaatttatctgtttcttctagattttctagtttatctgtgtagagttgtttatagtattctctgatgatagtttgtatttctgtgggatcagtggtgatatcccctttatcattttttattgtgtctatttgattcttttctcttttcttctttattagtctggctagtggtctacctattttgttaatcttttcaaaaaaccagctcctggattcattgattttttgaagggatttttgtgtctctatctccttcagttctgctctgtcttggttatttcttgtcttctgctagcttttgaatttgtttgctcttgcttctctagttcttttaattatgatgttagggtgttgactttagatctctcctactttctgatgtgggcatttagtgctataaattttcctctaaacactgctttagctgtgccccagagattctggtacattgtatctttgttctcactggtttcaaataacttatttatttctgccttaattttgttatttactcagtagtcattcaggagtaggttgttcagtttccatgtagttgtgtggttttgagtgagtttcttaatcctgagttctaatttgtttgcactgtggtctgagagactgtttgttatgatttccattattttgcatttgctgaggagtgttttacttcgaattatgtggtcaattttagaataagtgtgatgtggtgctgagaatgtatattctgttgatttggagtggagagttctgtagatgtctattaggtctgcttggtccagagctgagttcaaatcccgaatatccttgttaattttctgtctcatttatctgtctaatagtgacagtggggtgttaaagtctcccactactattttgtgggagtctaagtctctttatagatctctaagaacttgctttatgaatctgggtgcccctgtattgggtgcatatatatttaggatagttagctcttcttgttgcattgatccctttaccattatgtaatgcccttctttgtcttttttgatctttgttggtttaaagtctgttttatcagagactagcattgcaaatcctgatgttttttgttttccatttgcttagtaaatattcctccatccttttattttgagcctatgtgtgtctttgcatgtgagatgggtctcctgaatacagcacaccagtgggtcttgattctttatccaattttccactctgtgtcttttaattggggcatttagcccatttacatttaaggttaatattgttatgtgtgaatttgatcttgtcatcatgatactagctggttattttgcacattagttgatgcagtttcttcatagtgttgttggtctttatattttggaatgcttttgcagtggctggtactgttttttcttttccatatttagtgcttccttcaggagctcttgtaaggcaggcctggtggtgacaaaatccttcagcatttccttgtctgtaaaggattttatttctcctttgtgtatgaagcttagtttggctagatatgaaattctgggttgaaaattcttttctttaagaatgttgaatattggcccccactctcttccagcttgtagggtttctgcagagagatccactgttagtctgatgggcttccctttataggtaaccttacctttctctctggctgcccttaacattttttccttcatttcaaccttggagaatctgatgattatgtgccttggggttgctcttctcaaggagtatcttagtgaggttctttgtatttcctgaatttgaatgttggcctgtcttgctaggttggggatgttctcctagacaatatcctgaagtatattttccgacttggttccattctcctcatcactttcagatacaccaatcaattgtaggtttggttttttcacatagtcccatatttcttggaggcttttcttgttccttttcattcttttttccctaatcttgtctttaccctttatgccattgagttgatcttcaatctctgatatcctttcttctgcttgattgattcagctattgatgctcgtgtatgcttcacaaagttctcatgctgtgtttttcagctccatcaggtcatttatgttcttctctaaactggttattctagttagcagttcctgtaaccttttatcaaggttcttagcttccttggattgggttagaatatgctcctttagctcagaggagtttgttattacctgccttctgaagcctacttctgtcaatttgtcaaacttattctccatccagttttgtgcccttgctggagaggagttgcgatcatttggaggagataaggcattctggtttttggaattttcagcatttttggaccagtttttcctcatctttgtggatttatctacctttgatctttgatgctgatggcctttggatggggtttttgagtgggtgtcctttttgttgatgttgatattattgctttctgtttgttagtttttcttctaacaggcccctctgctgcaggtctgctgaagtttgctggaggcccactccagaccctgtttgcctgggtatcaccagtggaggctgcagagcagcaaagattgctgcctgctccttccctggaagctttgtcctagaggggcacccaccagatgccagccagagctcttctgtatgaggtgcctgtcaacccctgctaggagatatctcctagtaaggaggcacgggtgtcagggacccacttaaggaggcagtctgtcccttagcagagctttgctgtgagattctctgctctcttcagagccagcaggcaggaatatttaagtctgccgtagtgccaacagctgctccttcccccagctgctctgtcccagggagatgggagttttatctataagcccgtgactggagctgctgcctttctttcagagatgccctgcccagtgaagaggaatctagagaggcagcctggccacagccgcttcgctgccctgcggtgagttttgccgaacttcccggcagcttgcttaacactgtgagtggaaaaccacctactcaagcctcagtaatggtggatgcccctccccctaccaagctcaagcatcccaggtcgacttcagactgctttgctggcagtgagaatttcaagccagtggttctcagttttctgggatctgtgggactgggacccactgagtgagaccacttggctccctggcttcagctccctttccaagggagtgaacggttctgtctcgctggggttgcaggtgccactggggtatgaaaaaaaaaaactgcagctagctcagtgtctgcccaaacagctgcctagttttgtgcttgaaacccagggccctggtggtgtaggcaagtgagggaatcccctggtctgtgggttgtaaaaaccatgggggaagcatagtatctgggacagataggacagtccctcatggcttccctttggctgagggaggggggctcccccagctccttgcacttcccgggtgaggcaacgccctaccctgcttctgcttgccctacatgggctgcacccactgtctaaccagtcccaatcagatgaaccgggtacctctgttggaaatgcggatatcacctgccttctgcattggtctcactgggagctgcagaccggaactgttcctatttgaccatcttgccaggagtccaaaagctttgccattacttttaatgagagaggattctttttatatagcaaataacaaaatgttggaacttgttcaggtataaatatttattattctaagcagggtgtagggcaatatagaacaacattttttttttgaatcagggactttttaagaatctgctgaaagccattttctctctcaggaaaacgtatttactcactggattttttttttaactgtttctggggttccacagatgcatttctccactggaagtccatctatttgtttaggatttcatggtttagataaatattcaattataaatgtttaagttcttataacagtacttgccacatattaagtgctcaataaatgttgttgaatgaatggaaaggggaggaaggaacattcaagatatagttctagtcttctctaatcctgtaaggagtccagtctatgctctttgtgtatggctgtgactcagaaggatggtctttgttttgttctggagtgtctgagcacatttttgttgtggtggtggtgcattgcatgtgaactgggccttgagagaagttcaaatactgagtgaaaataaagtaatggtctgattataactgtcagatcgggtggttagactggttcctgaaacataaccaattccaaggcaaaagaaaagacatctcttcatctacccttgacttagcacctgctgaatagtaggcacttgttaggcatcgaggaaatagatattagctgtaatggaagcatggacaacttgctatgggatcatagaaaaaggcagggcctcgaggagcaaataggagtttgtcaggttagaaggggagtctactcaaaggggaacagcaaaggtctgggcaattgaatatgcatggaattctgagcatttcaaacaatctagtacttttttaggcactcaaaaatgttggctaggtgaatgcatgaatgaccattaaatgagatgatctagatatggccagatgggatagagataacgttgagaaacgtttggaagtagaatgggtatgacttggtgatatgtatgcagtagcagatctggatctgagtagggaaaagggagaagggagagagataaacagaaaattgttttttgatatttggtatgtgtgactcttggtgatgtcacctatgttgtctctaccctttcacctgctagtctgtctttaaggtcattttttgaggattgtaatgtgggaccatgagcccccttcaatcctgtatgttctatctttagtcctctaggtgtggatcttaagagtcaggaatagacaacagagcagggataggagagtactttcagagaaacagaacatgcttgtttgtaagggggtaatatattggatgaatatttcagtggctgtttcttttcaaccatacatcctgactgaccattcgggtcacagaaaatgctgtatcttagcacagtcaccctgtgtgtggctcaattcctatccctgggatttatgatgatgcttatttgttgaacattgcttttgatgagctccaggtgttagcacagcaacactgggagggaaccagagttactgctctttaaccagtgataaaacaggctcagggtgattccttacctgcctagggtcatagaggtgctactgaaactcaatcccttaggatataagatttaaattctaatacagcacttaaggaaacatttaaggaaatgatttcttaaggaaaaaaactcattctatgagggagttactctaaataaaattgttttctgtttcttcttctttttaactttctctacaaaagtatgttcacgtggagaaaaatgccctggatgaagaaccaggtgatcaggattttagtcttggttctgcccctaattacctctgtggtcttagagaaacctttgaacatttctatacctctttttcttgtgacatctctctgagtttgtaccattgttataggaccaagcttgtatgcctgctgcatagtaacagaccaattacactgagacagcagggtttacagtggagaaaaagtttaatgattgcagatcaccaagtgagaaaatgggagaagaccctcaaatctatctccttgaggagttctggactggggttttaaggggattatggagggtaaagggctgaaaaattggggtttttcattggtcagggtaagtgggatgaaataatcaggatgtggaaactgcattaactgagaatccagctctttggggagtccttcagaccagctggcatcagtgaggttcttcagaccagctaagtcagtagtttcatcagcatgcaggacctgagggaatatctcaaagggaaaagcttaacattttataatgttcaagttcttatctatagaacagttaaggggaactataatcttgtaacaggctctatatgattattggacaataggcaaacaactatggggaagcaggtcagagagcaagctgacctcatgactaatgctgaatgcgttgcaagcttgctttcagttctccctctcccttcttctctgattaactttataaagtttatagggacagttttaccatctatctctaaagttttggttagctgtaatagcctatattcttttttcttctgatgtaagttatggtaatgagacatctttcaaactgtttgaaattaactgtggattgaaaagtaaatcaaacatatcataaaaataaacattgtcagaagatattaccagcatttttcaagcagtaacggtttctgaagtaatatgattataaatcccttttatgccagtcagcctgaatatctccctccctctcctccctccctctccactctttctctgctttcctctctccctctctcgcttatctcactctgtctcgctcatgtccatatgcctcatacagtgtattgtagggctcacaattattttcaaggctatttccatcattttaatgatctgaatatttagaaacacctagaagtatgacatattacttaaatttgcagtagcgttttagtattcagatgatatttaaaataatagggctagtcattaaaaagaaacaaggttctttcaggcattcatattcatagcttagtatcactgtaattcagggcattatattatgttttaatttaggtggctttgtgtgagtgggcagctcagggagtggggcgagtaaggggagcaaaacagatcaccctaaattgcaactgagagttggtacaacgtccccttattttccagagaggcatgattgtgtttcagtgttacgggcaattacacaagtaagctagactgagtggaagataaatatatattttttaattggattttttgattttccaatttccacaatgtgatggtgttttcgacagagttcctcagtggtccctggataagaatgttaaggaaattggtgtctcaactttggtgctatctgtagcattctgtccaactcaggcatattggcctgggtgagtgataatcttttctgaaagtacagtgtttgaactgtactctacacactttacttgtatttatctcattttattcatcataaaaccttccaggattggggaatgcaggggtccttattattaactctatattatatataggataattgaaacttagaaaggtgtatcggccgggcgcggtggctcacgcctgtaatcccagcactttgggaggccgaggcgggcggatcacgaggtcaggagatcgagaccatcctggctaaaacggtgaaaccccgtctctactaaaaatacaaaaaattagccgggcgtagtggcgggcgcctgtagtcccagctacttgggaggctgagacaggagaatggcgtgaacccgggaggcggagcttgcagtgagccgagatcccgccactgcactccagcctgggcgacagagcgagactccgtctcaaaaaaaaaaaaaaaaaaaaaaaaaaaaaaaaaaaaaaaaaaaaaaaagaaaggtgtatcaggccgggagccgtggctcacgtttgtgattgtagcactttgggaggccaagtcgggcgaatcacgaggtcgggagttcgagaccggactggccaacatggtgaaaccccatctctactaaaaatacaaaaaattagctgggcgtggtggcgggcacccataatcccagttactcaagaggctgaggcaggggaattgcttgaacctgagaggtggaggttgccgtgagccaagatcgcctgacaggtggaggttgcagtgagccaagatcgtgccattgtgctccagcctgggcaacagtgcaagactctgtctcaaaaaaaaaaaaaaaaaaaaaaaaaaaaaaaaagaaaagaaagaaaggtgtatcaattgccaaaggtcacatagctgagatgtagtagagtttgaatttgactccaggtctctgatttaaaagagtctgagatagtgcagtgtttctcaaacatcaactgcatcagaatcgcctagggagcttgctgaaacagcttcctgggctccatagtcacagtttccaaatcagcaggtctgggatgggcacctgggaaaagtgatgctgctgcagctggtttaaggaccacactgagaccattggtgtgatgtacaaaaatgaaattgttagaatcaggctgcctggattcaaacactggctccactaagggcaagaactgggaaaagtcgctttatctctgagctatttattgctcatctatacctgcttcacagagttgcagtgaggattagatgagataaagcatttcaaatgcctaatggaatgtctggaatgtagaagtaactctgtaaagttacctattgtcatgtttcttattacattacactgccaggacttagctagtctttctcatgctttgagacatatattctatttcaatgtcccattatttgcctgtcccacacaggttgttttctatcaaactctcaggtattctttaactccttcttccacaattactgtctctagcttacatccttctccccccaaccaaaaattcagtgtttagaagttttcacatctgcttgaaaagaataaaacttccaaacctctggctttgcggttttgcctcaactttaattatctccagctattctgcgtctcgttcactttctggcacagaaaatgcagtagaattgtttgacttgagaaattctctttgagaataagctccttgaatacagaggctgtgtgcaacaaatctttgcccttctttggagcaaaaatgcctcccacagttagcaggatctgaacgaatacttggtgagtgaatggctaagtgagggaactggaaggcatgaggtcagaagagctttgccacccagtgtggattgttttgccattgtggaatttgttttcctcagtgaaaggctcgcattagaattcagaaattttaattctatatcttttcagttaccctctgtacactcccctggtcaaatggtttcttatccaacagtttgataacaatgctgatagcaaaaggctctgtgcatgttcctctttagctctctttataacaagcatctccttactgggtacctggtgctgaatggaacacaaaccatgctagtgtacactctggaaattttctttttcaaaatccccttggctcaattcaagaagctattatttttgttccaggatcaggctgatgggcatggagacattattatcctttggtaaggactgttatttttgcagtttggaggatgccctagatgtattctgacaagagtgggtctccagtgggatgtgctatgataacagaatagacgtcagcagtttctcactgagtcccagtgtggggttattttgcatcccaattcatcctaagtaggacacggcattgaattgggagaggttgcctcacatgcaagatgatctaacacctcatcctgaattagtgtggctataacacatgtagaaaacaatggcaatttaaaaagatattttataacatgttttgttcctgatgacaaaaatgtcagcaagttatgataaaatgtatacaaatttaatgaagaatataacaaggctaaaacttggggataaattctacaagtctttaattctctttctctctccattctaaaacaaaattaagtaatagaatatactgctatgtctcacttgccaacacaaagtattttctcataatctttatatgttctccaagattcaaggctacaactttcattggctatgaggaaaccaatgggatggataggacacactttatatatcaatctcaattatttttggatatttatatagtttttcaaattatttgcattataataaatgctgtattgaactttaattcatacatatacatttttctatacatttatgataatttcagcttaaaaactacacaaaagtagaattttactggattacaagtaatgagtatgctcttctgtttcataaatttcaagctacatttttaatgtaaattattctaatacttaagattttattgacgatggagttatagaaaacctcagtaaaccaacatcctttaaagaaattgacttggtagtcacaaatatgcccttatgaatcccacatatctcaaatataagaaatacatcaagccaataaaatttgaatgcaagtttcatcaagcctcaatgaactggtaattatatgtatttcagagaacacaaaaagaaaaaaaaggcatcaactctaatttatagataagtattactttgacactgaaaccggatactgacagtaaaataattctaatgactgatcttatttaagaccataaatgaataattcctaaataaaatgctaacatataaaaaatctagtgttttaaaaaatacgagaagaatttatttcaggaatgaagaagtgaaagatggatttgtgtatcaatatctatctatctatctgtcaccatattaatatctaagagattaaaggagcaaacattaacattgtcctactaggtataatggattttagcctgagtatcctaggctgcatctgctggaaagcagagcctgatgcacagattataatgttgacacttcgaggggtataaatccaagcagtgattgaggaaaataggtgatgtgaggcaagaaaagatgtacagcgattgtgttgctgtgctggccaccacttccgtacaagttcagagacattcagttgcaaagacatttaagcatattccctctgcttatgggaacttttctaaaaggtttgtaagaggaaacggcactgcggagggacaggagtggaaatgtatctgtctggttccctcctgactcttgcttcccattggtcaaattttattccacagagatctaatgcttctatacatttggcaacttggtagctactcaagaagccatttcccaagccctgttttgtggcatttcatctaagaccagaagtggaggggagattcagcaggtcagactaccaaccaagagagaaggaggcagctgagggaatgtagaaagcatacaaaaaaaaaaaaaaaaaaaaaaaaccttacatacaataccacacagaaaaagcattgcgtgcaacttaacacttttttgtgagaaaaaataaataaaaagaaaacctcttaaccaactaagaaagaaagggaaattacataatatgatgaaatacatagcagtgaaggagggaatccaaaagctatgacaaattttatattagtaagcatttagaaatggtactgttaatttgggtatgagacaaggatgcacatctccactgctactaatctaccttgtactgaaaatcctagcccttcccactaaaagtaaaacaaaacaacagaagaaaaagaaaaaaaaaacacagaacttaaccatatggttacagggaagatggaacatgcgatttctagctggtggttatgtgctcagctgaaattggtgtgcgtatctgtgaagaaggaattctttttttttttttttcacatgcatacgtatgtttattgcggcactgttcacaatagcaaagacttggaaccaacccaaatgtccatcaatgatagactggattaagaaaatgtggcatatatacaccatggaacactatgcagccataaaaaatgatgagttcatgtcctctgtagggacatggacgaagctggaaaccgtcattctgagcaaactatcacaaggacagaaaaccaaacaccgcatgttctcacccataggtgggaattaaacaatgagaacatttggacacaggatggggaacatcacacactgggcctgtcatgggatgggggaaggtgggagggatagcattaggagatatacccaatgtaaatgacaagttaatgggtgcaccacaccaacatggcacatctatacatatgtaatatacctgcacgttgtgcacatgtaccctagaacttaaagtataataataataaaaaaagagttcttctaccagtaaaattattgttttattatagggaatctgttttttcctctctggctgaatttaagataaatttatatttattagtttttgcaatacccttactttgggtgtttgtgtgcatatgtgtatttatgtgtgtatgtggtttaattctaaatggaatccggtgatctctctcaacttgagcattcatatgttctgtaatttataaaaagatttcatgtattattccttctctttttttctagaactcaaagtatacaatgtcatatttttccttccattctctatgtatctttatttttctaacatattttagaaaatatttttacctgtatattgggtaattttttagctatattttcctgtgtgctgtgtctctccttttctacaaatcctctgctacttattatctcttttacatttctagttttttgttagctgctgtctttcttatttatacataataattgtacatatttatggggtgtatgtgatattttgatacatatgtacaatgtataatgattgaatcaggatgtttaggatatcaatcacctcaaaaatgttttcctttctttgtgttaggaaacatatttcaaatcttttagatattttgaaatatatgagaaatgattgttaattatagtcattctacttttctatcaaacgtaagaacttattacttctaactgtatgtttgtactcattaaccaacctctcttcacccccattcatccttcccaccttttgataagcatcattctactctctaactccatgtggtaaacttttcagtccccacgtatgaatgagaacatgtgatatttgtcattctgtgcttggcttatttcacttaacataatgaacttcacttctatccatgtttctgcaaaagataatacgccaccataatcaagtgaaatttaccccagggatgcaaggatggtttaacatatgcaagttaatatatatgatatatcctatcaacataatgaaggacaaaaaccatataatcattttaacatatccagaaaagcatttgacataattcaatatccttttatgataaaaactctgaaaaaattaggcatagaagaaatatacttccgcataatcaagatcatatatgacaaatccgcagctaaaatattaaatggggaaaaactgaaagcctttcctataagaactggaaaaagacaaggatgcctactttcaccattctttttttttttttttttttttttttttaattgatcattcttgggtgtttctcacagagggggatttggcagggtcatatgacaatagtggagggaaggtcagcagattaacaagtgagcaaaggtctctggttttcctaggcagaggaccctgcggccctctgcagtgtttgtgtccctgggtacttgagatcagggagtggtgatgactcttaacgagcatgctgccttcaagcatctgtttaacaaagcacatcttgcaccgcccttaatccatttaaccctgagtggacacagcacatgtttcagagagcacagggttgggggtaaggtcacagatcaacaggatcccaaggcagaataatttttcttagtacagaacaaaatgaaaagtctcccatgtctaattctttctacacagacagggcaaccatccgatttctcaatcttttccccacctttcccccctttctattccacaaaaccgccatggtcatcctggcccgttctcaatgagctgttgggtacacctcccagacggggtggtggccgggcagaggggctcctcacttcccagtaggggcggccgggcagaggcgcccctcacctcccagacggggcggctggccgggaggggggctgacccccccacctccctccggacggggcggctggccgggcggggtgctgacccccccacctccctcccggatggggtggctggccgggcgggaggctgacgcccccacctccctcccggatggggcggctggcctggcggggcgctgacccccccacctccctcccggacggggtggctgctgggcggagacgctcctcacttcccagatggggtggctgccgggcggagaggctcctcacttctcagacggggcggctgccgggcggaggggctcctcacttctcagacggggtggttgccaggcagagggtctcctcacttctcagatggggcagccgggcagagacgctcttcacctcccatacgggttcgcggccgggcagaggcgctcctcacatcccagacggggcggcggggcagaggcgctccccacatctcagacgatgggcggccgggcagagatgctcctcacttcctagatgtgatggcggccgggaagaggcactcctcacttcctagatgggatggcggccgggcagagacgctcctcactttccagactgggcagccaggcagaggggctcctcacatcccagacgatgggcggccaggcagagacgctcctcacttcccagacggggtggcggctgggcagaggctgcaatcttggcactttgggaggccaaggcaggtggctgggaggtggaggttgtagcgagccgagatcacaccactgcactccagcctgggcaccattgaccactgagtgaacgagactccgtctgcaatcccggcacctcgggaggccgaggctggcggatcactcgcggttaggagctggagaccagcccggccaacacagcgaaaccccatctccaccaaaaaaatacgaaaaccagtcaggcgtggcggcacgcgcttgcagtcgcaggcactcggcaggctgaggcaggagaatcaggcagggaggttgcagtgagccgagatggcagcagtacagtccagcttctgctcggcatcagagggagaccatggaaagagagggagagggagaccgtggaaagagagggagagggagactgtggggagagggtgaaggagagggagagggctgaagaaggaattctaaggggagggggagtatctctaggcaaaagaaaaatgtggcaattaggctctggactgtaaatagtagtttctgccacatctatatgagaaaaaaccccaacagaacccacaaacattattaaaaataacaaaggagttcagaggatttcaagataaaacattgacataaaaaatcaatagtgaaccctatgtcaacagtaatcaattagaaaatgaaatggataagcacataaattataataacacaatctttataataactagaaataaatttaacttccaaatgtacaatattcttgcaaagaaaatcacaaaacatctcttaaacacatagaagatagtaattcttttaatgatgttaattcttcacaaattatcctgtaatattggtataattccaataaattatctaatagaatttttcataaaactgaggaaacttactcctaaatttatatgtagaagtagttgaccaaggatagccaagacaaaccagtcaacaaacaacaggaaatgaacaaaaagcatcaacaggaacaaaggaagaaaaacctctatgagatgctcagtctctttagtaatctaataaatccaaatgtaaacaaataaccacaagttgacattttatgtgcctcggattcatggatgttaaaaatagtaataccaaaagttggaatgaatgtggggactcttggatctagtgaaacttagggtagaagtgaaataggtacacacgttttgaataacaatttgctaacatctagcaaaattgatgatggctatattttaatatccaggaatactacttgtaagtatagtcggtcctcgttattcacagattctgtatttgtgaatttgcctgctttcgaaaacttatctgtaaccctcaaattaatattcatggtgcttttgcagccacctgtagacatacgcagagctgtgaaaaatttgagtaacttgacatgcatgttcccagctgaggttgaacaaggcaaaactctgccttcttctcccatttttcatactttaaacaagcttcctatctgtgtttgacttagtgccataattttcaaaggtctgtgcttttatttggtggttttactattaaaagtggcccctaagagtagtgctgaagtgttatccagtgatctgaaatgcaagaaggctgtgatgtgggttactgagaaaatagatgtgccagctaagcttcatgcaagcatgagttacagttaagtggctgtgagttcactgttaatgcatcaacaatatatatgaaattagttgacttttaaaagaagcacacataaaacaaggtttttattgattgattgacaaaaatattgtgaccagaagtttttaggggcctaaccctttatttccccccaacaataatggttcaatattagcttattcagtgttcaaagtgaccttatacaacataactactgcaaataacaagaatttattatatatatcataagaaactctcacacatgctccagaagatatgtataaaagtattcattatttgtaatggtgacaacatagataacaatcctaatgtccttcatgaagggaatggatgaatacattgtgttatattcatccaagggagtaccctcagtgctagcattttaatggagggacatataataaagaaaataactatgtaaaatatacaatattttaaaaggcactaaacattatggaggaaaattaggcagagaatggagataataagtgagtcctgtggggtagtatgctttgaaattttaataggatggtcagggaatgcttccttgcaaaggtataaataataatttgatcttctcttcttatttcataaggtagaacttattgaatttattaaatagtagtagcagatgttcttattttattcttgactcagaatctagcaaatagtaggtggtgaataaatgtttactaaatgaatgccttcatgtttcatctttaaatattatcttagctattgataaatacttctgcattttggtactcctaaaactttgcatatcttttcgtgtttcactgagtattttaattggaatcttggaaacagtgttttagatattgtctgctttcctccattcttctctggatgcccatgattgacattttaatctaagtggaacatcatatctgatatgaattgatgctcaatgaatgttttaaaaattcagctaatgaagaaactgagtgggtgaagggagtaccttatttatcttgatttataattttcaaataactaagtatttggtaagtgggcttctttatgttcttttgttttaggccctgcaaatcatagagatgggcttagcaaagggtactaccatttatttagcaatgattgtgctctagattcaaggctcagtcctttacatataatcatgacaataccctgcaaggtttatattatctctacagataagaaaaaaatttaaagaagttttgtgaatgtctcaacgtcatgcaacctgaaccatagcagagctggcattccaacccagttaatctgacagcaaaacctgttctcttttcttcacataatgatactggttcccagagtcataatcagtgtctttagaatggcctatttatttttgtgtgtttttttcctgcatggaattttatattaagtctctctgtactaaagcatatcagcagattgggggaaccacttgttgttttcaatttaataaacacttattgagctgctacaggaactgtttttaatgcttttccaaaaaagtgaccttctcaacatgatagaaaacatttccgaaaaactgatagctaaaactatacgcagtggagaaagattgaaggctttccccataagattaggaaaagacaaacacactaaaatcacacacagctagtgtatagttgtgtttcttacattaacaatgagcaatccaaaaaagaaattaaggaacaatttcacttacaataacatctgtattagtccgttttcacactgctatgaagaaatacctgagactgggtagtttataaaggaatgagttttaattgactcacagttccgcattgctggggaagcctcaggaaacttacaatcttggctgaaggcaaaggggaagcagacaccttcttcacaggatggcaggacagagtgagtgcaagaaggggaaatgttagacccttataaaaccatcagatctcctgagaactcactatcacaagaacaacatgggggaaactgcccccgtgatccaattacctccacgtggtcctgaccttgacatgtggggactatggggattaaaattcaaggtctgatctgggtggggacacagagccaaatcatataaacatccaaaagaataaaaaaactaagaataaatctacccaaagaagtaaaagtcttgtacattgaaaacaataaaacattgctgaaagaaattaaagaagacctaaaaaatagaaagacaccccatgttcacagagtgaaagacttaatattgtgaaaactttagtactattcaaagtaatctatggattcaatgcaattctataaaagatttcaatgacctttttcacagacataagaaaactgatcatgctggtgaggatatggataaataagaacacttttacactgttgatgggggtgtaaattagttcaaccattgtggaagagagcgtggcaattcctcaaggacctagaaccagaaataccatttgacccagcaatcccattactggatatatacccaaaggattataaatcattttactataaagatacatgcacacgtatgtttattgcagcaccgtttacaatagcaaagacttggaatcaatccaaatgcccatcaatgatagactggataaataaaatgtggcacatatataccaaggaatactatgcagccataaaaaataatgagttcatgtcctttgcagggacatggatgaagctggaaaccatcattctcagcaaactaacacagaaacagaaaaccaaacactgcatgttctcactcataagtgagagttgaacgatgagaacacatggacacagggatggaaacatcacacactggggcctattggggggtgggaggaaaggggagaaagagcattaggacaaatacgtaatacatgtggggtttaaaacctaaatgatgggttgataggtgcagcaaaccaccatggcacatgtatacctatgtaacaaaactgcatgttctgcacatgtttcccagaacttaaaaaataaaaaaaggggaaaacaaaacaaaacaaaactgatcctcaaattcatatggaattgcagtgcccccaaatagccaaaacaacctgagaaaaggaggaataacttcttgatttcaaaatttatgatagagctacaataatcacaacagtgtgaaattgttgcaagggtagataaatagaccagtaggatagaactgagagttcagtagtaaacccatctttctatgaccaattgattcttgacaagagttccaagacctttccgtgggagaaagactagactcttcaacaaatggtgctgggacaactggatatctacatacaaaagtataaagctggaccctcaccttaacactatatataaaaattaactcaaaatagatcacacacctaaataaatataagagctaaagccataaaagtaattatttataacggctatgaatgcttagatttgacaccaaaagcatgatgaactaaacaaagtaaacaaattaggatttatcaaaatttaaaaactttaccaagaaagtgaaaagagactttacagaatgggagaaaatatttgaaagtcatattttagataaaggtctgatatctagactatataaagaactctcacaactcaacaacaaaaatttaagcaatcaaattttaaaatgtgcaaagaacttcaatagacatttcttcaaagaatacagacaaagggccaacaagcacataaaaagatgttgactacctgtacatccacgttcagggctgcactattcacaatagccaaaaggtggaaaaagcccaaatgtccatcaacaggtgaatgaataaacaaatgttttatatccatacaatggaatattatatatttagtcataaaaaggaataaagtactgatacatgctacaatcggaatgaacctttaaagtattatgctatgtacaagataccagacacaaaaggacaaacattgtataactccattaatatgaaatattcagaatagagaaatccatagagatggaatgtggattggtggttgtcaggggctgggggaagtgagggatggggagaaactgcttaatggtaagggattttacttagaagtgatggaaatgctttggaactagatagaggtggtagttgcataacattgtgaatgtgctgaatcccactgaattgttttctttaaaatggtttctatgtaatgtgaatttcgcctcaataagttatttctaaaaaattatggctagctaccagagcttctagtaggtttgagatgggtagcaacttgtctattcttaaaacatagcacacatggttcagatgtgcagcaagggttgtgcactgctggcctccacgcgggcagtgtcctggaatctttcaaaagcattttctcattatcctattcctatcttcattttacccttatagaacttgactcagtgtatcatattctctatgtgtgtgtcaggttaggtcctctaagaaggagatgccaggagagaaatagacaagcaagagattaatctgggggaaataactacaaaaaataaagtgggaagagaacagagtaggtagaaagagctttcagactacgatgcagtttctacacttgtacaaagagagaggaaggaagaaggttgggtaggaaggacctcagacttcagttgagccctgagaaagtttcacccaggaaatggggagctcgagaacaaagactgctcatcaaaggagttctgcattgggctggaatcacccatctctagttcccaaactattctgtcattggctgagagcagctctgagagaatgtagcctcagtgatgaatgctggtatggatcagaaggtatagcagctggaggatgtccaccaactacacttttgccaataggttctcttgcaggaagatttgagcagcatatgcccatggtcattagagtgtgacactggagaagttttatcatctctctgaactgcatttgcaaaatggagttaatgtcatttttgttaccaggttttgagaggactaaataagtaaaaagtatctggtatagtatgtggacttaatattagtagctgactgtaattctttttctgttaacacatatgagcaaactgtggctcagagacagaaaactaccttcctgaaggccacatggctagtaagtgccaggtacaagattaaaatccagcttaacccaatgtcctacatatattatattcaggcacatacttatctaaaaatctatgcccaatttttggaactagggactgcatgaacactctatattctataaagctgttcatggagaaacatctgccagccctggggtgtgcacatgtgttgattttacttaatttcctcatggctgactttccattggcacatctcagagaaatgccaagcatcttctctcatcattagatgcatattggcatttgaagcttttggaaggattatacacttccagcactgaaatattcatcttcaaaaaacagtatcttaggagtaaaaaaattaagatgtaaattgattttatttaaatctcgccacttccactacacaaacccaccaagttaaaacagcaaaactggaaatgactctttttttttctttttgcagtcatctgtagggagagagaggaatagcagctgctcctcatctgggttgttggtgtcatggcagataaccagctgagggcctgagaagagccctcaccattacatttctcctgctgctactgctgttgtggagagtgaaatattagtagtactaatagccaggagcaacctgtgggcaggaagaccttacagtcacgcagcacctgcagcctctcacccatttgtctcacttcactagcttttctggatgttatttaagaactcagcagcccatctcttcctaccccaaattgcccacaccatgaagtcatttgtcagcttccactgtggaagggatgacaccaaactgctctgggctttccctgcatgtattcttttctggaaaaaaaaaaagagagagaggaaagaggttcagctttgccatgtttaggagatgatcatctggcacccagttaaccttgcaagacagtgttagacatgggatttagttcaattaacatttttagtgctgatgacggctaggtgctggagatttggaattgaaaaaaatagttcttgtcttcaaagagggacactcagaagcaaacaagttccaacccaccataataagcatggtgatagaattaagatatgtatgtggcagagaaaacagagagaacaatggtatggggtatgtgtgtgatgggatatctgaggccctcagaaaaacttctgcaaaggcaggggattgaaatcagtctggtatgtttgaggggactttaagaattgctacagcgtaatgcacaaggagggagcggttttgtacatcatactaaacaatttagactttatgaggttagtgaggggaagccagtggaggatagtaagaaagtaggggagatacgaggtcatgttagtgtttttagaacaattctgtgctaacttctgatggatgctgcaggagaaggactagaggctgggagattgattaagaagcacattagaggagtccaggtaagaaaggaagaacagaattaatgcaaatggctgtggcactggagagaagggtgggggagatgtccagagcttttgaataagaagtaataataacaataagtaatagcaacacaaatagtagtaatataaacattagttgctgttgctgtagtaacatttattgagctctcagatctgtatcaggtcctgtgataggtaagaactcttttcatttacaacaatccaatgacatatcacagggacacaattcctgatctatcattctaaaatattttaaattctgaaaccaaaaagtttctccaaacccatttgcagtaaagcttgaacagacttctgaactcagtggaaaaatctgacttgaaatgacaggaggctatttaggctttatttatgttaccacacatttttgctgtaggaatataaatgtttttgattgcaaggtgctcctccagaccctcctggcaatgttaaccgaatatgcaagaggtgatataatgccctccgtgggtgttacaaattatactttatatccactttattacttttgtaaattccaaagcttctggatttccataacacatctaacaccaggggtttcagataaggaattgtgagcctatagttttcacttatggctgtggaaatggaggaatagatagattaagcaatttgtccagagacatacaaataggtggcagcagaactggatgggaattcagcttttttggactggagagcctgcactttgaaccatttttgcactgtctgcttaggttggcaggaagagatcttagagatcattttacagatgaagcaactgatgtttctttttaactagcttctggatatggcaatgccttgctttagagggattcgaagagaggaagaatttccttaccaagtttactcaaataagtcctttgtcccaaagaaaagattccagggcaatggaggaaatttctaggggtggagattggtggccagctgtggcagattcatcaggtaaaggtgaaagataagagctgcccaatgtcatggggtgccagatcaaaggcactggaataagattctggttctcacttttcaaccaagcaaaataaaatgatctctctctctctctctctctctctctctctctctctctctctctctctctcacacacacacacacacacacacacacacacacacacacacacgaggaagctagaagaaaccttgtcaaaatattaactgtggtagactttgggtggcaagattatagatgattttagctttgattcttaaagcttactacatttttcacaatggtcactttgtgctcttatagttaggtagtatgcttttaaattttttaaattataaattacacattttaaagagagagaaagcaataagtgccttataaacaagagacagtcagtaaatatttgttgattttctcaattaacagacttatgctccttgctaattgcccatgaataccaggaagtttaacggtaacatttttaaatacttggagttattttatgttttacaaaatatttttcaatttttttaactatagttttttgataaatttatttattcattgcaataacaacatttaaaaggaatccaaatatttctatgtcataatgggttgtttggtaaaaataaaataacacttacataataaacattctagtaacatgagagaacttaggcattcttttaaagctaattaaaacctaattttacctgtattaggttttaataaaagaactaaagtcttatattgtcaaagggttatgatattttatactcattaagattaaacaataaaacatctgtaagccacagaaggaaaattttttattaagcagctaacttgtgcaaggatgattaggggactctgagaaagtggttggcttaatctcagtttttaaaatatgtatgctctaaaccagaagttttaacattctttagccttttattgaatcactttataatattttgcattaaagtaacaataaattacaacagatgtgctgcatggcatgatttttttcaaatacaacttttctttgggccttggttttctcatcagtagctgtagataataagctgtatttcatagtagtgtgctgttaaatgtttaacaatcagctcttataaaaaagatataaagggagaaaaaagctctgatttgcagtgttccctaactctgtggtgtaaatttccccgctattgctgaattcaatgtaacattaaggcataattaaatataatatttctttccttactacatatataatgcatgtaaattatcttagcatagataatagtaaaatgtagtaaaataattagaaaatgatgcttttggggtatttattaccttcgttcttaatataatttttagcttttatagtttaagtattattaatggttgtatttaacaaccagcttgcaaaatttctgaaaatttaacagttgatgctttggagctagcgcaagccagctccagcattccactcactaagtgttatgaagattaaaaagaaataattaattttaaaatgcctaatagtgtcttggaggatcataggtcttaagtaaatcttcattttgtttcctcttatttcgtgttttattaagccccatcctactcctcggagtccatgacagcatctttagttttaacaccaattccaaagacaaaatagcttcatgcactgttttgaatattcagacaaactggtaagcaggatttacttactattattctgctaaaaagggtcagcttgaatatatagaagaaagacaccgacatctccatctaccttgtaattgtgtgttcctggtcacaaaacctctgtgcctgttattcactgcccccttttttattctggatcaataattctttaattttccttatcctagaactggcctagaagagagagttacctcataagaaaatcaaatctgttactttattcagcttcaggtgagagttctaggaggtatttccactggtatactggaaacaatatacacccgactaatttttttagagtcactttttgttttatttattttcaactataagccatgttattagaagcctatatgtaccagagttcatgtagttttctttaaaatatattttattatgctttttatacatgaaaggtaagacatgctcaatgtaaaaaacatgaaataatactgataaatataaagacaaaacaagttactaatacttctgcaactcagagagggccactattatttctctcccctgtgtgcatgagttatataattggcatcatactatatttccagtttagtattcagtatggataatttttaatagccatggttaatctagaagattcatacattatgtatgagcattgttggaaacaaagtttcattaaatgcacaaacctgtgttttctttttttatataaattatcataatgccttaatttcatgaattagttgtggggaattacacttgccagttgaacataatattattacttatactcagcttccaggacagggttagagcacatacacaaaaatgcacacaaacaggtaacacaaaacacacattttggggacaaacatgagcacaaactccagctttgttacttgtctggctgtgtgacttagggcaagttactccaactctttgtgctcagttctctcacatgtaaaatgagaatactattaatacctacctgaacgtgcttaggatgcaggaagcaccttatgaaagatagctactgtatgttcagttttgactggcccaatcctgccagcttgaatcagaataagatgagccactgactatagcagcaatggtcagaggatgaactgtggggataaaatatataagtgtttagaactgtgcctgacaccgagtaagtgctttgtaagtgctgtcactggctgccagtttatgtacaacttaatggttaacttatcatccaaactgagaaagttttgagagtgttaagtgtaatactttggttttaaacaacaggtgaaaaccaggactgtctgggggaaatcaggataatcttaggcaaacagacagatattccaccctacacatccacccagctcttccaacttcccggaatatacactgttaatagtttcttaaaacttctccttttcttcataagtgtgcaagcaaacatacatacatttttaaaatttttcttcctttttacacaaaagataacattcactgtttattgtttgctgcttcattttttttcacttaccaataatacatcctggagatcacttcattgcaacacaaactgtcgtccttattcttttgttgttgttgttgacagctgcattgtattccattgtttggatatactattaccttatttaaccaactctccattgttggattttagattgtttataatatgcagctacttcaaatattgctgtgatgaatattattgtacataggtttagagaagtagaattgctggatcaaagggtatatgcgtttacaattcggaatggtattgctaagtctcccagcataaataagccttatactaatttgcatttccattagtggtgcaagagagtgcccattctcccatagcatcaacagcaagctatattgacaagtttttgttttgttttggaagttgacagttattttagtatagtttggatttaataatatgctacaaagtagttgtgatggtaagcatcaatgtcttattcctgacttgagtgatatgccctttgaatttccccataaacctgatccattttatatggtttggctctgtgtccctacccaaatcatctcaaattgtaatcctcatgtgttgagggagggacttggtgggaggtgattggatcatgggggcatttcccaccatgccggtttcctaatagtgcgggagttcgcacaagatctgttggttttaaaagtgtttggcagtttcccccttctctctctctcctgctgcctgtgaagaaggtgcctgcttcccctttgcattctgccatgattgtaagtttcctgaggcctctccagccatgcagaactatgagtcaattaaacctcttttgtttataaattacccagtctcaggtagtatctttatagcagtgtaaaaacactaatacattattgtttgagacattttttattatattaagtctccctaattgttggatattttatcaagtttatttttttatttaaaaatttttttaatgattttttttttgagacagcatatcactctgtcacgcaggctggagtgcagtggtacgatcacagttcactacagctttgacctcccaggctcaagtgatcctccgatctcagcctccggagtaactgagactacatatgcacaccaccatgcccagctaatttttttatgttttgtagagacagggtttcaccatgttgcccaggctggtctcgaattcctgggctcagatgatccccaaccttggcctcacaaagtgctgggattatatctgtaaaccaccgcacctgaccttttatcaagttctaaaaacacttttacaattcagctctttctttctttaggaaaatctgtatttttattcgagtattatcttgataattataaattaatttaatacccttagtcctttatttatcttacaaggatcaattagtagtcacaaggaagcatcctgacttttttccctcttctgcttcctctctctttctacctgattttaagaaatgatattacgtttcttattggttaactttgtgttgttaaatgtgactatattttattatttgatttttcaattttaaatgatatggtttgactgacagatgctttatatgagaaattagcaatcttactccatctttaaactcctttccccctttccccatctaatttctgttatttgcatgtatctacacagtcaagatattaacatatcagcattagagtgttgtttctgtcccagcaccctaatactgacagtttattttggtcttatttgaagagttaaatgtattcagtgcactgtttttttgccatactttcctcagtcatctcataattgtcctctagtatttttctcaagaaagactccaaattacaatatatctgtaattcctatatgttcaaaaatattagtcagtggcctttataactaaaggacagtttggctgtatttaaaatctttagctcttaatttcattctttgaaaaccttgcaagtgttgctatattgtatttcagtggagaatttctctgtagaaaaatcggatgcaagtctgatttataccccatggttttgcatggttgcctaggcaattctttagagcgtgtgataaactttactaagacatgtctcagtattgactatttttgtatacatttcttggtacatgcagtaaatttttaatatatttaatgcttttatttcaggattatttatttatttcttgattgtatgtttttaattattctgtttcacaattacatttagctttcatttagttttgttcattggaaactgattatgcataggttggttcttctttgcttttctcatatttttcattgtctctctaatctttaattactttttctttctttatctttatgtgcctttttttttgcttttctcatttttagtttttatgtcctttactgtgctgtcttatgtactcttctagtgtcttttaaaatttctcctttgtctctggttttttcccttcctgcttgtttcctggtttctaccaactcttttcttcttgttatttttcgatctattgtctgatttcttatatttgtgctcattgtcttccttagaagacaagggggatggtttcattaaatttttaaagctaatggtaaaatgtgttcatcacaattttcatatgtccatgacattttctaagaactatgctttgtctgtaagattttttttttgctcttttccacattttaaaaatattttctttgtatcatgtctgtgccagttcactttttattgctcttcagtgagcaaaagtttgattttcctgaattagtgatgcacaggaaatttctctttgaggtgatgagagtccagagtaaacttaagggttctttcctttgctgctgctgcatagacagactcatcttattatgtctgtgcactgtcttctcatcttctctcaaccagatttagtacagcagggcttctgctaccagctctgcccaccccacccccatccattgcaaaaaagggatatgtcttctgcacttcaggtaaaaccctcacttacaaacgaggaaatccatcagtgttgagttcctttataagtctatttattcacttttttccctcccaggacagcttctgcttgctctgagctgcttttggcagctcttttgtatgttttgattttctgtagcttaaattcgtcttctagtcccagtaaaaatggagtttgagtttttaaaaaattgtttattacttttatatgattttcatgagaagaacaaaagtgttgatttatgcatcaatgagcatatcagaagccctgaagactatttctgccaaaataaaaaacaaagcaaaacaaaggacgaggtctatggttctgaactgtacattgtctgtctcagccttaagttattcctgggttttcttaatgcttaaaggagaattcatatccttctatgaatccacatatcctctataaagaccccattcactgccctctcccctacaaaaagcctatagttgatgcttcctagaattttctaaacataaacctctaactcttcaacttctgcaaatattttgtcttccagcttgctagattgacgtttggttgaactcctaagatatccctttcccttatgcctcctcaagcagaagctatttctcaaagccacattaccaaggcatactatcttctccctgaatcttctggtcatacagttttgatcattgaaggccttgttcagtcttacttagccccttgccttctgctattatcctagaaaatgtttcatttaattaatcatgccaaaaaggactcgggcctcacattttcttggctccttgccttctttagcaactttttctctcctctaccccatttattctatttgtctttcctactcttggctttggtcattaatacaaaaccctacctccaatatcgctaattaaaacatcccactttccagatcacttgctcaaatatctctatacagtgattctattaccttgttgagatgtccaagttattgatttcttcaattctaccagccccttcctgtttcatttttattctatccagataatataccatggccttcacttaatctctctcttgcaagtactctcaatccattgcaactgcctgatcccagccaaactgaacccagctacttgctgacattcaaagagctagctcaagaccgctggaaaaaaatcacacatgggggaaggatggtatcattgtcaattcataagcaccaacaaacatctgggccctcagtaatgccaaaatatgttatttaatttctttattgaattttttctttatcacaaaatacttattaatattttacatcctcctaaaatctctaaacttctcccaaccttcttcaaatgacatctttctgttcacagaagaaatagaagccatcaaataggaaatctccctttttccagcacaatatggacagacttacctgcattttcttccttgatgattaatggaagaagcatcccttttctaatcagcagccaatgcctttttaggtactccagacttcacccattccccctgctttagtaggtattccctctagctcccacagctttgtctctgcttcctaactgggttatcctaggagcctgtatccctgtcatgtcatactttatctcagcaaactaacacaggaacagaaaaccaaacactgcatgttctcattcataagtgggagctgagcaatgagaatacatagacacagggaggggaacatcacacactggggcctgtcagggggtggggggctacaggagtgatagcattaggagaaatacctaatgtagatgatgggttggtgggtgcagcaaagcaccatggcacatgtatacctatgtaacaaacctgcatgttctgtacatgtatcacagaacttaaagtatgattaaaaaataaaatactttcccttgatcttgcaccttttagtgacattttataacaaacatcctaaaatatttttgtacacttgctgcttctactttcttatctctcattcattttttgattcacttcaatcaaaattcctcactttttgattcactccaatcaaaattcctcacctgctaactccacctaaactgatcttgttaaagtcaacaatcgtcttcctaaattcaaatagttacttttgaagctttgttttgaataactcataacagcatttaacatagttctatcaaaacagaactcttgatttccatctctgtaccctaaatctcttcctttgcagtgcctcccttctcagaaaaaagaagctccatatatctagcagctcacactataaacgtaggcatattttttcatctctctcatgttctattcacataaccacttttcctttctttaaaaaaatacttttcatttatttctcttctcactaactgtaattttgtaccctttgaccaacatcttatttcccttatcccttagcgtctggtaaccacagttttactttctgcttctatgagtttgattgtctcaggtttcacatataagtgagaacatgtgttttttttttttttggtctttctgtacgtggcttatttcacttagcataatgtcctccaggttcattaatattgtcacaaatgacagaatttccttctttttaggagataaatagtatcccattgtgtatatatattacatttcctttatttattcatccattgatgaacacctagcttaattaatttcatagcttggctactgttaataatgctgcagtgaatataagaatgtagacatctcttagacacactgatttcaagtccttaggatctgtacccagaagtgggattgctggattatgtggtaattttatttttggctttttgaataacttccataccattttccataatggtcgttctaatttaccttctcaccaacagagcacaggagtttccttttctacacatacatattccacttttcacgaagcctctcaaatttcctcctagaatgcttttcaaatatattcccttttcttcttttcctttgccactgcttcagtccaagattttgtcgttttctgacttgactgctgtaatgacctcctctctattctcttctattccatccttcctctttcccaatccattcttcacactgatccagagtgattcatgatgaactcacgtgatgtcaagttattcaccattgcccttaaaatccagaatcttcaacatagtccacaaggtaccatctaacccttggctacctctcaagcttcacattcctcctgttctcagtgtgtcagccatgttgacctgaagactttgcatgctattcttttttctttgagatagagtctcgctctgttgcccaggagcacaatcatggctcactgcaacattcacctcccaggttcaagcgatccttctggctcagcctcccgagtaggtgggattacaggcacccaccaccacacctggctaattatttttgtattcttagtagagatggtatttcaccatgttggccaggctggtttcgaactcctgacctcagatgatctgcctgccttggcctcccagtgcatgctcttcattctgctatttcaccgtgtttgccaggctgctttcgaactcctgacctcagatgatctgcccaccttggcctcccagtgcgtgctcttcattctgcttgaagtgttctatcaattatttggctgactcctactcatgtaccaaattcaacttaaatgttccttcctcagaaaattattttctgatccctaagggtatctctcttataatatttcatcatgctgtttaccctttctccatggcctttatccagttatgtaggtatatattcatacacttctttatttaacatctgtctcttccataagggtccgggtcagtcttgtgttccacttaatcatgagtacctagcacggaacatgacataaagcaggacctcaattgatatatgttgactggatgattgaaaaggaatccaggctgggctcactttgacacagaggtatttaatggcataatatgtcatatttcagatagccaggtttcctttcaggattctatactgtgaccttggaactgaaccagctgattttatggtaatgaggcctttcaaattgtcagcatgtgtatacttctgtttacactgttgacctttggtttggagacctcctgtcctcctgtccaaacctattagctgacatgtgagatctttctgatattcacagctagccacatcattcaggaaagcccatgaattttcctgtcccctgactgctatgtgcatgggaaacattgccttttcactgtggtagttatagccatatatggttggtgttcacttgtatcatggtaccaaactagaagtgttttgaaggtcaataaacttggagctgtaagaaccaaggagattgttttctctttcttagaataatataatattagaactggcgagtaccttatagcactaacccaaacctttattgtacaagtaagaaatttgaagcccatagaagtaaagtaatttctccaaggtcaaacagttgtgcgacccctttgttcactatgccctgcatttgtcttagggacaaaaaatgtgccaactgactttaggctgatttttggaattttttttctaagttgtaaagaggtagagcaaaacaaagacagggatgaaatgggggaggggacataaatgttctttgtgatataaggggaagactctattttttgtctcttaaaattgtgatcataattgcaattaggtaaggatacctaattgcacaactttccttggtccacagaagtcatatgaacataaattctaaaggaagtcctaaaacacagtctccaaacccattattatgatgcttactattaagacaattaggtatgaatgttgttctcttatggacacaattccctttgaaaaagaatgttgctggtgaaaatgagattaatcttcgccttcctgagaagacctcagctgtttcttcactttttaataaaatgggtttaccaattttgtcttcagtgaaatagttttcatttcctgtcttgaaacatgtttgcagtatttgtatgctgaggttgaattttgtttagtggtagttgagtttcaagagcaatattgcaaaagatcctgccagtctaatcgggagagcaagttttgttggctatacttcctaccataacggaaacttccctgactgaaattgatggggaatgagtaaatgtaagttgtctttgctaaaatatcaggtagtgatatttcctgtatgaagtattgacctatgcattaattagaaatatttctgatcaacacccttaccatcctgtaagggtgagctcattctttctcactttgcaaaagttcatttgtcttatctcatagcaccttatgagaggcgcaggcatgtgaagagaggtagaaattttgaaagtacctgtttctgaaactcctatagttataggaatcaggtgtgagagctccccactattcaataagtcctttgctacttaagggaaagaagccctaaagggtggcagcatttttctttaagctcccatatgtgagggcccaaagagaaccacatataattgggaacttttcaactgagtctgttccaactgaaacaaggaagggagttactattcactgagcaattactatgtggcagacactgtactaagcgcttaataggattaccaaattacaggactccaggaagcatcactcacattgcacttggtataaaatgtaccaaggacagttgtgcaattagatattctcacatttattatcacaattatacatctgtcccatagatacccacaccaataaatgagtcctttggcttccagtttttgttttttttaaattggaaatccaactagaagattggaagaaagaatgaggtcagggtgtacgttcccctgcccctttctctgcaaggtcaccctgagctggttatattactgatcttctcaaggtagcctcttctatatgacccttttcctctgggctctgtctccttctattttccctttgtacatatgggttactgcaatgtcccttgatggtctgctgtatcacactcatcctaatttcggtgtgccatctatttcctatgaggaccttgactcaacaggatgaatgctttctgattagaaagttaaggcactttccactacctcttgttaacaaccattggaaagtgccaatactttaacatgactatctattgaattaaatgaagtcactcgctgctggcaagacctccaggggatgcatcttaagttcctacttgtaaaatctccacagtacatttgtaatagcacttgcagacaagaggacctgtcctgcatgtggatcttatacatggtgctcaagtgattgcccattgatacacaatagaatagtacttcctatgaaaagtgttctctgctcccagaatcttgtcaggcagccaataccaccaatgcagattcattcaatagcagtaaggctttgcatctccaggagagctcctttaaagattaaaaacccctgacaggggtactcacttttgacagaatggataattagttggtgagctttccaaaaatagaggtaggcagaaaagaatgggacacagaagggggtgaattttgataagggagggagaatgtgcgaaagaacagcatttggggctttgctgaaggggcagatccttgcagatctgtgagggatttcccttggaggccaagggcactgtctaacagaggccctgtgaagacatggagaaggggcagaaatcagacgtgagactgctgattttttatgtatttcccaacaaaagagaagcccaaagcagacagatttttatgagtgagtctcaaactggagggggtccccaagaaggaataagaagggtgaaaaagttttggaggggatgtaccaaagatcattcaaatcctggtctttacctgggatctctagtccctagtgggcttagtgtttgtaataaggtggtatctgttctacttatctggcatgaatgaatgagcagcaagtaagtgctgccaccaaatgattggtgttttctaacacaggatctgaaaatcttttttttttttttttttttttggtgaggacaagttggggactgatgattgatgaagaaaggagaagaggagaagatgacaggatacataaaatttaaacctcactgaactgagaaatcttaaccagcccagaagcagggacatttctctcttttcaaggcctccttgatggagaggggaccttgatctagaaatcagagtggcttctttgcaactgtagtttaaaagactatctagatctgcttttcctcagctattcctaggactagccctctctacaggacaccatccagagcctcctcacttatggtaaatatcagaagccaggcttcaatgcagaagcagccagctgctgctcattcccttccatttttcatgtcccgacaaaggtgtcagggaaacaaaagcttctcaaatggcagcttcccctagcacatgcctggaggcctgacaccctcccatctataccagtcttgcctggctggggtgtggacagcacagtggtcacttcaggatgtttgctctaacaagcatggccaagtataggcatagacaggacacagttctgtttccttgtggtgatcacacctcaggcacattcacttgaatacagcgtcaggtctggaggtagagttgggaatggtttttaaggctagtcactgccaggatgttgttgctttttcaggttcctgtttgtaacagatgggtgatttgcactattgaatggcaaagaaaaaaaggcattgggggtcactggcttgaaaggcttgctcctttgaatagatttgggctgctttcacgataaaattcccttaaaatttttatagccaagtagatttaaagcaggaattacaaagcttttgtgttaaatacaatcctaatcatatctgcattttttttaagaaaagaggactgttgtaaattttagataacctgtactgtaattcatggatatggtatacattaattatggtataattaatacatgcttattctggattttgaacagcgatatcatataagaactcatgtttacacattttgcttaatgctttaaaacataatccttcctgtttctctgatataaaagtaatatatgcatgttcattaaaaacctagaaaactttatttacaacttagaaaataccaaaattcgcaatgctaaaaattaaaatcacctataatcccatgactgtgaaagaaattaacattaacattgtggtgtatttttctctaggcttttatctcatgcatacatccaattttctttagcggttttcatatatacagttaatgacatcaataatgcaaatagaaaaaatatcaaaactacttttcttgcctatttctaaggttgtccttgaatgagtgttctctcaagcatgatccagctacttctatgtcctgctacaaagacaaagccagaaaaccatggtggcgatgagggaagtagagacaggcagagaaaaaaatgaaactctggttaaaactaagaacagaggataaactgtcctgctgaatgtatttggataattgttttacacaggggacaaaaagattatttctttgattgattgattaattcatcagttaacaaaaattgattggcttcttaatttgagccaagcactgaacttggcaatggggtaaaaatacaaaaaaggtatacccttgacctccaagagcacccagtctggagtaggatcagataaataactctgcaatgacatgagatgtcatgacagtagtaattgagccacatgagtgagtgaaagacaagtatttgtagtggtaggaaggaaagaaacatggagatgtgatgggagaagggctctgtgtgctatattagggagtttgctcttaatcatgaaagtgcctgggatccactgaaagattagagagggatgttaaatgataacttttgtattttagccaacacagttggaaacacacaagactttgatgacagacagatgcatgactctctgaaaagcaaaacaaaaccaaccaaaaaacaaacgagaaaacaaaaaagattctttgaatcttaatttacccatccgtaaaataggaatgatgatgactatttgcaaggttgttatgaatattaaataagatagtaaattataaataaaagtcactgaaacttaataggtggtcagtaaatggcactagctattgttagttgcaaggcatgcaaggtcctttaggccagcttgttctgtcttgctccttcctctctcccacaccctaattctataactcaattctgtacccctctcttattaccccatcctcagacccctactccttcgcccaagctgttccatctctccagtgggctttttatctttctattgcctgctttaaaactacaacccatccttcaagacttgactcaaatagtcacctttctctagggtattaaaggaattttggagacagaagagaaatggaacatttctcactcaaaattgggagactgagtttaaaagggtgggattatcagtctctgacattttgcttagtgaggtttgcaggtaccaactttaaaataattcattcccacttaaaatagctgaacatcaaagtgtgctcctctgttggaaagtccacggattggtaactgactcagggatataagttttcatttctgggttcatctcctccttccccttctcaagaaacttttcttgttttactgacatttttattctcctatatcctcctatatctccacatgtttcttttcattataattgttttcgtatttcatgttgttcatatctttattttcaaatttatttgttacaaggattattatttttcatcttaaattcttagtgtgtcggttctagtaattccgcttcgatcaacaaatgtttattgttgaattgtctttgtttttttacaatgcttgtcacaggctaactcagaaggaagacagcaaagacagttaaaagtttctctccatcccagtttttcactgccagcattccatcaccttggggtttctcacaatttttttgttaacccctctgactcacacctgcctcttctttctctaaattctccatggttaattctatcagagagagcccaacagctcatgctagttggccatcttattacttacctttaaaaattacactttgttttatttaacttgtgtatagtaagtttaaattgtgtgtgtatgtgttgtgtgtttgtttctattagtctctttattccatctgcagagaagaaagaatcaattgtgtttctgactttctcactctcctgtccaggaaggtggaaaatatgtctcatgtccctaggttccctgaaattctcaataaatgcaggataatatggtgactagtcaccaaaagtcagaatgcctatgtttatttctcaagtgttcatttgatgtgtagccctggggaggctgcccagtcagaaacttaatactttctagattaggagtgtcttagtgcatcctacagagggttgatgcaagaattcgaggcatttacacatgtatgtattttagaatagtgttggccacatcataagaatacattgatgtattttctcttctttctcttcctatttttttctcccctatccccaaaccaaattttgtcattcaggcagaagggtacaaatcttttttctttctccaaggagaatcttttgagcacaatggtaagtttatttttttatgttgtgtactagttgatggaaattcacagatggaaagatggagggcctataccctcatggaggttatggttttgtggagaaagcaggcaaaagttacttgatgaatttgatcaaatgacctaactgtgctgacatcacggtgatcccagggtgttaggagagcattgaggtgggacagccaactcagcctaggaatgactctgggcggctctggctccttggccacccagatgtttgagctgaaatgtggtatgttgtgtgggtttgtgtgtgtgtagagtgcaagggggaagagaagggcatccaaagcaaaaggaaagtacaaaattatgagagagagagagagagagagaatatgagaacaagagagagagaatcagagagagagagagacttttagcaatctcaaaatgacgagaggaaggaatccacaggttttgagagtgaaacttctttatgaagatgaattcacagaaaaattcaatgtgaagagaaaaatcttgcaatcagtgcttgtgcctgaaaaacaggatctgtcctgacttaagctgtgcttcaaggttgctactaacaaggttacagtaccatttggaaaaaccaaagaagaggtgggagctgaaggagaacagagagcatgttgcatttgtgatcctgctgtttgagccccagggacatataagtcaccaagtcattccatcagctggttgataacactcacgtttacactgattagtttaggggtttaatttcctttatagccaaaaagtatagtttatgtcaccattgtttctattacatcctttctagggactgaaaatactattactggtctagacacacctctatactagtggttttcaaattttgatgcatattagaatagcctaaggaatttttaaaaatatcaacattcaagccttactctatttaaattagaatatctgagataaaacacaggtgccagcattttttttaaaagatctccaagtgattcctgggtgcagcaaagttttggaaccactgctatacacatttcaagataatttagtattttctttacattctagatcctttcactctcctgtttggtaatttttgtgatttacattaaatcatttctatgatgatgtctatgatatttggtgaagtgcttgagctaagttcacggctgaattgagtggtatgactcagtttctgcttctcttgccttatccctcccactccttcttcactgataaggttggaagttgggatgggggatgaagatgaatacctatccagggaaggaaacaaataaggacttagcagctgtaagggagacaagatatgtcatgtggctatcgttagctatacttctgatgagaagagtacaggacttttgttctttcactgtccttgatgagtccccaggggacacgtaatgtctggaagaccctgcaagtagccactatcacaaggtgaaccactgaccaaaatctctcttgagtctcctgttctgttgaattaagctgggccacgtaagagtcaggagggtccctttggtcttttggattcagagaagaataaggcagccactggccccttggtccctttagtctctcattctgggtcttacttttggtggagagaggaggattagaaagaaaaccttggggtggtatgggagtcattttacttagggcctggggcttagctgacatgagccactagcccacatgaggcatcttttaccccagacccctctttggttctgttggatttttttttctatttttttttaatttttttttttttttttttttttttgagacggagtctagctctgtcacccaggctggaatgcagtggcataatctcggctcactgcagcctccacctctcaggctcaagtgattctcctgccttggcctcccaagtaggtggtactataggcatgcatcaccatgcccagctaatttttgtatttttagtagagacaggatttcaccatattggccaggctggtctcaaactcctgacctcaagtgacccacccaccttggcctcccaaagtgctggaaatacaggcgtgagccactgcgcccagccagttctgttggattttctgcacatcccctgcctctcacaggccttatagtccctgctccacattctcagaactagtgagatctctctgcacagtgcaagagtcctgagggagcagatagaatgtttggtgacaatattttatacatacatacacacaaacacacatttttgcctctgtttctttggtaatactatcagcacaaaagaggactacgataaagcaaaagttatttgtagcaggctttttcattgaactaaactctgactttcaagtaaaaataaagttaattcatttttaaacctcccatgagctaatttctttacagaacttgccaaagagtcccacatgttcaatgaactggtccaacttataattaaacctatttgttttaaaggttttggcccaaaccaaaatatacaaacaacttttaacatgaaccattttaatttacagtcttgatctataataattatttatctttaaatcatagttctttcaaattatctgagctttaagtgtgggcacttgggcatttgctattaatatattctagaccacaggacaggagacatagaaacagacataacacttttagaggatacactatatttgttattatgcttgcttcttttatgtctattctctcctctaattctcacaatagtcttgggaggtagctattactatctttctttttagaataagaaaacagaggaacagagaagttatgtcacaactagagaatgtttaacaaattaatgcccgtgaatttccaaagcactttcaaccatatgttatgtagcacccaaatgatactcatccatttgagcatctcatgccctccagatgcagcatgctgtttccatgttttcaccattctttgataactggtcatacagatgggcatttcctgtcttcttttcttagcctctccaaatttagatcaggctcttggctttagcttaagacctgtctctcttagtttatggatgaggtagtgatgattctgtgtaaagccactaaaccagttctggcatgaagaaggctgcttgtgttcttcacaatagcgaaggcatggaatcaacctaggtgcccatcaacagcggattggataaagaaagtgtggtacatatacaccatggaatactacacagccatataaaagaacaaaatcatatcctttgtagcaacatgaatgcagctggaggccattatcctgagtgaattaatgtaggaacagaaaaccttataccacatgttctcacttgtaaatggaaggtaaacactgggtactcatgtacgtaaagatggcaacaatagaaactggagactactagttgggggcaagggttgaataactgactattaagtactatgctcagaatgtgggtgggtgatgagatccatcacactccgaaccttagcatcatacaatatgccccggtaacagacctgcacatgtgccccctgaatctaaaataaaagttgaaattatatcaaaaagagcctgcttgataaatattacctctcttctctcttctctctagtttggaccaaagcatgtctatcttctctgggctttgtgatcactgacttggtctttgctaattactttgacgattcatcatgtatctacttgcagaactctcttttatattaaccctagtaacataatgattgtttagcacttactctatgctctatatctgcattgttgctcactgaatcctcacaacagtgctaaggtgaatcctgttattagttctattctgcagatgaggaaaccaaagtacaccttgcctatcattatggttagtaaaccatggaggtagaaaatgaactcaggatatctgattaaaaaagcctatacatttacatatcatactctagttccttccttgaataaatatttcatgtacttgatcactctgaaagtttttcaaaggcagtgaccacgttttgttatttcagagctcctcatggcacacgatcaagtattgggcatatggtaggcgctaggtaatcaataagttgaattttaggggtcttagggataaagagagagtatctatgactatgaacatctctttccagttatctgtgaaacttatttgctacttggactgttcacctccagtgaaatagacaaacactaagactggagtctgagagacctgagagttaaagaacgtactctggtgttctaatccagttggtggtggaagtaggaatagtttggtgctttttgcccagaagtgacatcatttcttcttgggggaagtgagtttctgagatgcagaggcaaagttgtcactcttgtcacccaccctttggtgccacccagtaagtgtcaactgtgtgggagcaatgttgtcagcccatcaggtgtggacaggaggcctttgttctgctcaacagcttaacttctggttatgccataccactgtaaggataccagaccatcagacatcttctttagcttcagccatttaccatgtaaatctgtctttgaggcagtatcagtgacaagctcaatttgcggagagggaggaaggagaatcgaggagcagtgcccttctagatgaaatgcttggagtcttacacccatgaacatttggttctgagatttgacaaacaaatgatgaacatttgtttcagaacatttggttctgagatgacaccatagatcatatttgttatatttctaggtcaactgacattttaagggcctagttcctggttccggagattttttttcttatcagcatctgaagccactgatttttttttttgtatttaaaatgtttttattatagaaaatttcaaaataataaccactgactttaaaatacccccacacccaagatatctgtcatcagttgatttaggaggctccacttccagtctgtcctgccttgaatatttgtcaaacagtccttgatccttagccactaggactttgcagacatgtaaactaatagctatagcatgtaagtgataattagtgtgagagaaagctaaaccagaactgtaggaacacaaattaaggagtgactaacaaaggtaagggggaggtcgtgaaaattttgtcaagggattaaaattgggccaggaagagaaataaacgagtaaaaatgttttcatgttaataaatctacatataattccataggccttctaggacttgaaagtacgagaaggaaaatgagaatagagcaatttacagtgtctggagaatagtgggcctgatcaataaaggtaggaaaaatcagtgattctaggctaagaaatgtaggctttggcctgcagcatttatgaatccacagaaggatgttgggcagcggagtgacctgatcagatttgagtttaacaatttgccaaacatccctaagcaactcacacctgctgactgcaatgaggaataaattacaatggatccaggctggggagaatgagagaagtgactctgactcatttgaggtttgtttccttagcttttgccttatctctattactgctttcttttaattaaattttgtctattttaaaaaattcatatattcactgattcacttgcttattatagttttctttataagtatcacctagttcgatgttaaagataatctaaaagggtgttggtcctttagtaagagaattttacctcttcatgatcaataacatattatataggttgacgctatttctgccacctattatttactttttaagtaaaattttatctgagtacaacaaacatacagaatagtgcacacattgtaaatatacagctgggtgaattttacaaagcaaaccctcctaaatcaagatgtagtttatttctgcactccagaagccttcttgtatccctcccatcattgcattcacaaaaggtaaccattgttctgcctttatcatttggcctggttttcaacttcacaaaattgggatcatacagcatgtactgttttgtatttagcctattttgtttaacattatgtctagatttatccatattggcacgtgtatcaaactgtcctccattttcattgctatatggcattccatcttatgaattgaccacgatctagttattccccatccttttcttaggctgcatgttgctgttgttatttctaatttactcattcaggattggaaagaaatctatccagctggcatttaccagtggacagattaagtggagtctcatcaatcctcttcactattcacttagtgctagcatttgctacttctcagttgactatctgaaggtcaccttgatatacctgacttaagttgctgaatccagcaggcatttatttagagtagaccttccaggctagagctggaactctgacttaaccacaagctcagcacccagtgtagtacatgaaagacagcacctcctacactgcactgtttcctgggcattctcacttcggctccctacaacacttttcatagtaaataaaatattcccaaatgcaatatgcctctacctgttattctttagcctctagcattttaaaaatgctttttcttctctgttaatcatttgtcttctaatgtgtttcatgtgtcttctaatgtgtttttgtgattaaataattttgggaaatattatacaccatatctcctttttggagattcacagtgcaaattaacatagtaatggctctaaaatgtcctgttacaaaaaaactgttttatgttataaagtctaccattgttccttttaagattatctattagcacctcatagaataacagttccctagcacacagctctgtagaaaacagccagaggaaactccacgtgtggttttttttgcttatttgttatttgttttttcctttccggtatgattgtcagcttctgagtctgtctatggctattttaatggaaatatggcagagaacaagcaaacttaatcttttctaaatatttgtttgcctgttcatttctccatcagcctggaaactccatgaagatagaaaccttgtcttttcatctttgtatctgccagtacctaccatggttctcagcacatactcgaagtattaaataaatattttgtgtctaaatgagcgtgatatcacattctgggacttccagcattaagggactcaaactgaactgtaaaatgaacctagatcttgaggtatgtaaggggaggaagaataacattatacacaaaatcctgcacttttgagtttaaaaaatctgactgaattctgcttcctccatttttgggttgtgcaatctagcaatttatttagattttctgaatctcaattttctcatttgtaaaatggaaacaatatcaacagctaccttccataactcttgaaaggattaaatttgatcgtattatgggaagcactgggacagacacataattacccaaaaatgcttgtccatgagtattactcttgcctgtgagtattctacatctggtgcttgtttctctggtctctctctacccaccctgggaactgcatgttttcttgtactggagttcttttcacattcagtgagaactagaaatccacagaattctcagctgccatacacaaggcatctgccagatttcctactcatctgataatgtcttccacagtcttgccctggtccactgacttgatcaattcagccaatgttcccttctgcagcaagaggccctctgaagtttctctgtgctagtggagagatcttgtgtctttctttttctatctattcctgtcaaactccttcagtgaatatgcatttctcacattgttatgtgaaagcaaccccacctggtattcagactgaagaagtctcactattaaagagtgagagagagagagagagagagcaagaacatatgaatttggtgtgtgtctgtgtatgaatgttgacatgccgacaccactccttccatgtctgtagtggctttcctcctccccaaagcatcactcaaatgtctgtgatagctggtcatgagtctgattgcagcgacaaacacgatgtatcttccaacatgtcctccctttcaaacatccctctcttcaacttcaaaaacactcggctcacatgctacatcttcctaaattctagtctcttctttgttttcatccatagcaacactagcgaggtcatttaccacaaagcttatgtcatcccacttggaaacttttagcagaaacatgattacacattggacataaaggtactgccacgttagaaagaaattctgaggagagctttgctccaatattgtccccaaggtctttcctcatgagttgccacttcactcctccatgcatgtggattgcagacattgctagtgaatcatgctattcattctcatcctgtctccacaagtaagatgggcagtcaccaccaatcaacaggcactggcagatgatgaaaagcctagcagctaaacttgagcctgttaagtcttttgagcacttccgcatccagtctccaccaaatagggcaatgacagacttatcttataaaagagtcctgttttcatgagttgctttgttctttagaaaaaacaaagaaaacaaacagtagttcagtatgtccagtgcatgtcactagccacaagttgctatttcaatttaaattaaaaaagttaattaaaaatatatctcctcaattgccctagccacagttcaagtgcttaatagacacgtgttactagtagccgctgtattgtccatcaccaatacagaatgtttccatcattacacatatttctactgggcaatgctgaactagagattgtgctctttatcctgaaaaggtatttctttttatactttgttatctgttcaaccccctcttctttcccaaaacacaccatgttgtcctctgccaactaagcaaaagcatgtcaattaaaaaagtacatgaagcaattcttaaaggagacagagtggaagcagaacaagacccataagtagatcagttatcatgctttctcaagtaaactggcttctggcttcatatgttgtctgtcgtttctccctttgaacataagaataatcctgctctgtttttttttttttttttttctaactggaaacacaaaatccacgttgtgagccccccagcttcctgttaacgtgaccctagtggaagaatccaaactatgattttattaagaaggtaaaataactgaacaaaagaagactaagatttgatctttctacttggtaaatttagttgcctgagaaacaagagtaaattatttcagtgccaaaataataaaacattatttaagtttgctttttctctctcgttcaggaactatagttgcctttggtatgccgggaaaaggaggggctgtgacaggaagaagatagtcatttatacgatttctcttgcgatttagttcaaatttaactcttaaaactttctgtcagcatttaaaattattcggttacacttatacattaaattcttctcctgaagatgggaaacatttgagtgctataaagttaatataaatgtgatgcaataaacatagttactttctggagaaatctcatctttatgaatcattgttagagtcaaaattgtaaggccagaattcctaagaacatcaatgtatctgattccatatgcacatttccccaagaagttgtttttcaggaaatgagatttctgctagattttttcttttggtctctccgttgtctcaaattataaagttcaggaaatgattgaagtaattatttattgcatctgagagatttggtatggtatgttccagaaaaacattcatgtatgcatattgtccattttgaatgcatatgacaattgtcatattgttaattcatgtactcatattgttgtattattcatgaaaaccatggccttttgtgtttcatgtggtttgtatctgtgtttgctgggtgttgtagctccaccatctataactcctcaaatgctcagtgtttgaaataatcagaggagggaccttaagttcttagaccctcaacttgttgatgaagctaccattacatatagagtgacttgagcagccttgggaataaaggaagtaaagtgaatttttaagcactgccagagcacaatctcaatacatacactacaccttagagatttattgggattggaatagggttgaagtttgccttggcatggtctaaaaagaaagtaattgttaagcaaattacaaatcatcttataagaattggtcaaaaacacaggcttcagaggccactagacccaggtttaattcctggctgtgtcacttactatgacattgggataagttatttaaccaccacatccataaaatgaggctgacaatactgatctcaagaagttgtctcaaggaataaataaaacagtgtgttttattactgtagttaatattagtagctaggaaagcaagtttttattttattttattttattttgagacagaatttcactcttgttgcctaggctggagtgcagtggcgcaatctcggctcactgcaaactccgcctcctgggttcaagcgattctcctgcctcagccccctgagtagctgggattacaggcatgcaccaccacacccagctaattttgtatttttagtagagacagagtttttccatgttggtcaggctggtctcgaactcccaacctcaggtgatccacccaccttggcctcccacagtgctgggattacaggtgtgagccaccgtgcccacccgaaagcaagttatttttaaacgaattatagaacattatatgtttgatgaggacaaaaatataaatatatacagcttttctccttttcccaacctcttgggaagtcagtgtttgtactgccaaaatgggagcagaggggccctgagcagggtgtgtaatgattaaagtcctgagaggaaagaaacccagagggcagattaatttacaaaataaaggactctctgtgaaatgtgggggaagaaagaatctaaaatctaaaggacttagagagaaggggaggagacagagagggggagggacagccaccaggtgacattcagggaagctagatgggccaagaaaattttggaagatgttctgtggtgtaaatccccacctgtcacttttttgagagtcttgttaagcagctaacctataaggaggcagaacagcaaagtggttaagggcataagttctgtatttggaggtcctgggttcaaatccttgctttaccactttgtggctggacagctatgtgcagttgttgtacctttctaggatgcaatttcttgcctatgaaatggaaatgggtgtcctaataggtcctacaaaaggattatcccaaggatccagtgaaggattatcctgaggatctgatgacctattgttaaatgctgggaagatatataagaattaaaagaatgttctatgaacctagtggtccaattaaaaaacaacagcaatgatcacagtaatttgcatttattgagtgctcattatggcccagatactcctctgaagacttttatgtggattaattcacttaattctgaacacaactctacaaagtaggaactattattatccccattttaaagatggtaaaacagatatagagaattcaagtaacttactcaaggtcacacaacaagtaaatagtgttaatggtagtgaatccatgtgagtttgcaattcttgccccctcagaagaaagaattcgaccaaggaggcataaggcagaaggagagaccaaggcaaggtttagagcagaagtgaaagtttattaaaaagctttagagcaggaacaaaaggaaagaacatatacttggtagagggccaagcaggcaacttgatagacaagtgcacagtttgaccttttgacttggggttttatatattaacactcttctggggtcttgcgtcccttcttccctgattcttccctcagagtgggttgtccacatgcacagtggcctgctagcacttgggaggggagcacgagcagtgtgtttactggagttgtatgcatgctcatttgaggcattctttccttaccagtggaatgcccccgatggttatataccagttaaatggtaccattttggctcttaatatgcatgctcgagcctactggcccaactgctgaaatcttatccaaaagctgctgatcaccagtttcaggtgtttttatctatggagactgcctttccctggcactggctgtgactaattattattttagagagacagtgtgacaactgcctgaccatcacctgatggtcgcctgacattcctgatggagtggggggagccctctcttacacttctcatgcctgactagctacctactttaacagtagtagagctgtgattcaaactcaaatgcttcaatactagatctgtactcttatcccctgtgttatcttgcatctcatatacgagtgtctgttcctaagataagtaatatctgggggaagtttgccttgttttatagatgcttggtttgtactcagcaaccttgttactcaaggtgtagtccgcaggctagcaggatcaacaacatctgggagcagaatctcaggccctactccacactcttgaaacagaaactacattttaacctgcttcccaggtgatttgtgatgatggtgaagtctgagatgcactgctccagagtatgaaacttcaggcaggtggactatctcatttatgcctccatctcttacagtgtccagcacagtgcttgccacctatgggtaagttcaagacagatctcctcttgatctaaggaatgttgcctaggaaatggattgacaagtctgagtggaataacaccttgttaatctctggttgagcgagtggatgttcagtgcctccagcattcagcacatcaggcacatagcagatcccttatacacgtttcttgaattgtgatggaaatgttgtgagatagagacatccagcaccctagccttccctggatgtactatgacattttaaaaggctgaataatgccaaggcaagcagaagagtgattatgcacttattcttgacacagtcttaagacaagctctgctcagttggttcccctgtgaactcaagctgattctcttccctcttgagttctctattgtctttgtgttgtttgcaactcattcagaaactaattaagtttcaggatcagtttttcctgttagagaatgtgaatatgctgaagtggtagtttttaataacttaaattatctcagtgaaaggacaattataatttgtttctaaaattggccaaaagtcagcttttatcaaaataattctcagcagacattagtctccccaaggtattgtgtgaaaggcaacaaagaggatttaaatcagccatggagaatgtgttgataatcgggctatattaatcctgttctctagcagtgtgtgaaattacttgtttactccgcttctctgggcctagaggtagctgatcactcgttgacagagccatattttgtgatcacctttcagcagtgagcttcagctggaccaaagccaaacaatttgatttcactgtcctgtgtaccacctccaaagtcaaggtcaggcacaagaactcatgaactccagtatattttgtcagggctctcatttgtgcaggcaccaggaggtaagctgtggaccctgagtataattgtgaaaagttgggaattttgtctttagtatctccatattgctttcctgtaccctatccctctagaaatgaaggtttatgttggcttcatcaccagaccagaaatattaccaagatgagcactactggggatccagtaaagtataagaagtagtccctgatctaaaggagtttacacacacacacacacacacacacacacacacacacacacacaacttggagtgcctcttgaatctgtttgtattattaataattattggttgctagataatattaccacaaatttagcagcttaaaacagcacacatttattatctcactgtttctgtaggtcagaaatactgttgcaggttatttggaatcactgtctccaagtatcacaagtctgcaatcgaggtgtcagtcagggctgctgtcacatctgaggttcaactggagaatgatctacttccaagctcacatggttgttggcagaattcattcctttcagcgtgttggactgagagtctcagtttctggctgcctattggatgaatgttaccctcagttccttgcctcccaacatggccacttcattaaagccaacaagggagagagtctcttatcaagatggtgtcattatctgaggtgtcataaaggcagagatgacattctattacttttgccatattttattggttaaaagcaagtcacaggtctcacccatactcaaggtgagggtggtatacggggcatgaataccaggagatggccatcttagcctctgtctgccacaccactcctaatttttaattccagctgtactgttctagtttagctcttttccagacagaaaacagaatcatctctattgattcaagagattttaatgaaaagaacatttacggttttgtggtcaaagttaaaggaattcatacggaggttcctagagaccagccactgtggtaaaatagacccaatgatattctgcctacatgccctttatccagtaagtgcatccctccctcaaggacttccaagtgttgactgataatggctcatggctgcctcttttcttgggaatgcctgattgctttcagccaaggggaggaagcagcaaatctaagagttcatgccccctcatccctagcatgactttctcacatggagttaaataggctgaacctctttccttaagggtacaattcatgtcccagagcccccatggaatcagattgaagctgtactccagctgagaccacttctttgcttcctgcacttttcttctctcctctcctctgaggtaaggaaatcaagtgcatctgaatccctgtttcaggctttgcttctaggatgcccaccttaagactggcaggaaaacattacaacccataagcctgaaggggtaaggagaggaaacagtgttgttactaaggccagtgatatctgaaggcttgcagatagagctatggtcatttgcatggctactgctaaagatcagggtaggagttcggaagaaatatgctgttctctttctccccccttccccagaactgcatccctttagtgaaacccaacataacacttgccaacagtgtgctggcagtcaatggaggtaagccttttagggccctgagcagagggaagaaagtagaatcaatgggaaaaggaggaatagaagtgagcagcaaaacagcctcatatgatcacaaatgttttttctctcctgcagtccaaccatcatattagtactagactgatctttatcaaatatttatttgattatgcccatttcccagcttcaaatcctctgtttcccgttgcttaaagaagtgatccataaaatttctgaatcatttattccatgatttaaaaaactctaaacatgtgcctccagtttatatgtttattcttttataaattacttaaatttactatcattaactaataattcagagcaagaactacatacacttgatatagaatatcctatcagtgattgcatgtatcaatccatatttcaagaagccttgataatttttaattatcttgggcaactattgacacatgtataagattgccactattataagcaagtatgatggccaacgagaacctcagactaggagaaaaatgtgtcacctctgctatttcgtggtgtttggttgcctacattatttttttttacattcaataagatttctttgcagtaatccattggagaggtagggatagttaaaactaaatatcatcatctgaaattcatttaaccaggcccatgtgaaccaaaactgttgtaacaacctggaaatgaataaatgagggaggatgagacaattgacccctctgcattgtggaaatcctgtcattcccatcagatgccttgtgaattgcacataacatgtgactatcttttatatggaccaagagagggcttttattgagtataggattcccatagagccagctgatgctttggaaagaacactgattgaagaataaattgtctatcccaggaagttaataaagcagcttcacaatattagaagagctgtcaccattgttttactgtctgacttgtgaacctgtgagagttattggctcatgtgtatgaatccacagataaactgatttaaaagatgagtgtgtgctcttagatggagggtagtatgctcagattgtacaggttgtaaatacagaagacatttaaatgggcttatagaagtttggtcttaatagtgagacatctaagagtttttcagttggtagtgaaagcatgaatgattttatctggagataagtcagagcacaataacaatagctaccactatcagagcatccacaatatacctggtattgtggtaatcacattacatatattatttaatctgctctttacagcacctcttcaagatagatattaccatctgagacgttaaataccctgcccaaggatacatggtcagtgaatggaggagtcaggatttgaatcgggaattatgtgtctccttgacagagtctttttgcattatacctcacaatcaagactgatattagagatgtcccattctatcgtagcttgcatagtattttatgtacaatatgtatgtaaaaatacaatatgtatttcctaacacatattaaaacagtggatttggaagagatggacttggcatgagcctataaggatagggaaagttagaaggacagtgatggctcttggagataggagaggccagtgaaagctgcagaagaggagtgtagattccaaggagccagttaatgcattgggaaaagcggaattcaggaagatattgattgaagaataagctgttcttatcagttgataaagagagtttgtaacacacttacaaacctgtctgaacacaaagccatctttccaccagctgattctttttctccctttgctttgttgtaaatttcattttctgtatactctgtcacctatgttgctgtagtgactgatctgctcacaacttgtaaaaatagaaggaaaatggtttatgaagctatagacttataatctgtgcattttctgtatttgaatagaatttatttacaagtagaagggatgtatgactctgtacggaggttgaaataaatcaaggatatttgttgtatccactgttccttggtacatttgaacagttctccagctaaaggttttacctgtggtaaaaatagctttgggctggctgatagaaaactggtactccagccccagctctgccattagaataattgcataatatgggcaagctgccaatcctctctgagcttgaattttttcatctgtaaaaaacaaatgtcccaaagtccctattaatgttcactttggtagaagatagagcagttctcatcctaaaactaatttcccaacacatattaaaaccagaattgcaactctccaaaactacaaatttccctaacctaagggaactgaggttccttttacctaagggaactgaggttggtaaacattttctgaagagggccacataataaatattttaggctttgtggtacttgcaatctctattgcaactactcagttctgccattgtagtgaaagcaaccgcagataaatacataaatatataaatgaataagcatgcctgtgttccaataaaacgctattggtgtgcaggagtgagtgtgtgtgcttgtgtgtgaaatacataaatacataaatgaataagcatgcctgtgttccaataaaatgctattggtgtgattgagtgtgtgtgtgtgtgtgtctgtgtgatgcgtaatgctgaggcatagccatcatcctgtaaaagaggtggcatgctgtactcagttaaacctggtgtagtgctggtaccaaggggaagctcactaaatatttgtggaagaagggaaggagagagagaggaattattcccattttatagatgaagaaattccactgcagagcaccagtgccatgtgaggttgaggaagccattgtcattttccctaatgaatctacaaagaaacagaattccataagcaaggtattgaattttgctcctaagagaatcttatacgttcagtcgtcttcagagaaggagagcactgatggcctctggtggatcactggggctctgggatgcaaagtgttattataaaggatatcacatggagagcatttcttcatgtgttttttggctgcataaatgtcttcttttgagaagtgtctgttcaggtccttccccccctttttgatggggttgtttgtttttttcttgtaaatttgtttgagttcattgtagatcaaaaccacaatgagataccatctcacaccagttagaatggcaatcattaaaaagtcaggaaacaacaggtgctggagaggatgtggagaaataggaacacttttacactgttggtgggactgtaaactagttcaaccattgtggaagtcagtgtggcgattcctcagggatctagaactggaaataccatttgacccagccatcccattactgggtatatacccaaaggactataaatcatgctgctataaagacacatgcacacgtatgtttattgcggcactattcacgatagcaaagacttggaaacaacccaaatgtccaacaatgatagactggattaagaaaatgtggcacatacacaccatggaatactatgcagccataaaaaatgatgagttcatgtcctttgtagggacatggatgaagctggaaaccatcattctcagtaaactatcgcaagaacaaaaaaccaaacaccgcgtgttctcactcaggtgggaactgaacaatgagaacacatggacacaggaagggcaacatcatactctggggactgttgtggggtggggggagggggggagggatagcattaggagatatacctaatgctaaatgatgagttaatgggtgcagcacagcggcatggcacatgtatacatatgtaactaacctgcacattgtgcccatgtaccctaaaacttaaagtataataataataaaacaaaaaaacaaaaacaaaataaaacaaaacaaaacaacaacaacaaaaaaaaacaaaaaataaaataaaggatatcacatggaaatgggcagggggcctgcagtgcttaaatgtagctgctgtttccacaagttcagaataggaagctttgtgcttttcctccccatcactttcccccttttgattctgaattctgatatggcaggtgggagtgggaaagggaaaggtgagaatgggctagtgcatttgggcacagggattcagatgctgggcctctgtcttggagctggcttgctgagagcattttgagaagagggcaaagttttaggggtgggaaatatggctgtttcttcagaaagaacaatatacttctccatgccatcacataggagttgagttggatttttagtcttgaaaacttgagatgtgattaaattgatgaaccaacaaatctgtacaatttcacacaagccatacacttattgaagagctggattacagtttgcagcctattgaactaattcattaattttatttcacaggctaaaaattttactatgcaaatgtatgcaaatcatacaagaaagtagtgttcttaaccaagtgcagcagcacctgttttttgtttgtttgtttcctttgatttgtttcactggaactgtgtcactgggttggaaagtgagataaataccttcaatgtttgaaactgtgtgtcaaacaattttctgaagggtgattgggaggctttctcctttgacaaatattgcagtgattggcacttcttttttattcttttacttgcctaaaacagaatgaagaagatgagcaacatttatgagtccgctgccaacacactgggaatctttaacagcccctgcctgaccaaagttgagctgcgtgtggcgtgcaaaggcatttctgacagagatgccctttccaaaccagacccctgtgtcatcctcaagatgcagtctcatgggcagtggtttgaggtaggcatgtccaatgaaatggacagaaccatggctggatgattggctcaaaaatgttttgatattttatatcttcaggtggtttattttgatgaaataagaaatttgagaagtgaatatgatcacatttctatcatgatgttttgatgttgctgttttgatgttgtggatattttgacatttacccttaattcatgagcctaagactttttaggtgtttttgttaattaccaagaaatactcacaatatactcttcatcccatgcctactcattggcaacacacaggtagcaagaggaccaggaacagacgtgaacccagaccccagactgggccggggtgagaaagttccaaaaactggttccagagacaaagtcttgtggccaaggcagagttcagattagacttaataagaattttgggaatggtagctttgaggaaacaggttttagggggttgagagagaagtgactactcagatggaatgagctcagtagatgacagtcctatccataggtcccgaattgaaagagggaaccaagaggacaggtatgagcaagtcagtcccatgaaatctctgtctgcagtagaggggcaaactccacttttgggagctgggctgggctacttactatccagggtaactggccagaactgaggagtagggacaaagactgaagtccagttctctgaccaagcccaaaacagggtgactgttggacagagctgacccaggacaaatcgtagatctatagagaaacataaactcttgttgtggacccaagagagccacgtgggaacccaacaacgataattaaacccagtcttcaggactgaagaagtgactcgttctaagccgcatgggtttatggggctgagtgggatggttacctcagtctgagttggttgaggactggagaaagatgaatcctgcatgtggaaatcatgagtagattcagaagtaaggagatggggatggcagaaataggaggaacgggctgggggcctacaagctcataaggccagcatgcagttttaaccagctttggaaggtagcaaaaccacattcagacatcccccaagactcatgtgtaaaatatccacttggaatgtttcctaacacacactgtttgctgtgcttgtgcaaggcagctgctcctttggcagtggtgtgaatggaatgacatttctgtgagtcattcttcaaagagcgatgggcccccacgttgttaagagatgacttgggtttttacaaaaagtttattctgggaaggatttattcatttttgtgcctgctagactctaactgatcacggacccagtggagagaagctctaggaaaaacagtggggttctttgtatcaactgtgctacacttggcgagatgtttctctgactaatggtggtacctggggaagaacaaggggacacatcatgaaatatttattttttggagcaagaacttgaaacaatatgacctaaactttactgggtactttttaagtgccaggcactagtctggcactaaattaccagtttagttctttcaaaaattctatgagatattatccccattttacaggcaaggaaatggaaagacaaaaagattaaggattttcccaagagcagtcagcttgtaagtggaaaagctaatatttaaacccatacattggagctccagaaactgagatctttattgctattttataattgtgctggacactggtatcagtctttggtggtttgtgtggcaatattttaggttgaattccgcagctaggttttttttgtttatttaaaaatccaaacaaattggataaggactgattttaagtttgtctgttttttttttccttttttgcatctaggtacctagtctaagtaagccttgtttttaaagatctagctgatgtgaatggagaaatagggaggagaagaggatgtagcagaggaagcagttcttattctaagaaaataaagtactcagaataagggatttgaagccatgctgatcagagcacaaatagacctgttttggatcccttggaccaaattctttaagccttcaatactatgctcacctgtttataagcagccggaaggtgtccctctaagagacagtcttccactctataggagaaagaaggttcaaaagacccgagagtcagcatgtttaattgtatgtagatatgtgatatcagccacttctctgaaagaaaggcttgatagcagttagtgagcaggtgaaatttaggtgaggagtcaacatacacagaaaatgaatgctgataggcagattggggaatcttaatttaacttcaggcctatcgaaggcttagaatgtaaatataaaacagtattcatgggtgtcttaatacatagtatcttttttttcccttctaaatattctcattgactttgttagtctcattattttttatttaacaaaactaaatggaatgcctacattataaaaaagtaactccttggaaattacaggcaagaaatccatctacttctaacccgttaacataattcaactattatttgtacatatttattttagtctttttcttctggcatgcatattctcatatgattattatcatgcttgtaaaattttctttcctaattttattgcttagtagtatgtgcttttcctcacattgctacaatattgatcattgtaatttcaaagctgcataatatcccatcaactggatttaaattcatcaattttttcactttgaaattccttccagatataccctattttaagtaatactgcaataaacatctttgtgcttgaggattttcccttctttttggatgagttcctacaatagattctgttaagtagaactggtgggacaaataataggaagcttttgaggcttttgatacatattgtcaaataatttttccaaagcgtcctattaaactatagcacacagctaccacaaactttgccacccgtgcacagtgataagaaccttgtgccacagtgtaaattgattcacggcttcctttacctagaaagtctcactctataaccattaatatcagcttaattgctagcatgcttaatcatatggttcattgatattgtggtacttctagaagcagtttagcaaattttgctctcttaacaatatacagtaaggatataataataataataataataaaaccaaagtgcatgccaggtggctaagagaaataattagataattagtaacaaagaagctgcaaatactgaaaacctaaataggggctgtgaagaaacccagggatgaacaacaggaactctgcttagggctggagcagtcatgtgttggagtcagcttatatagtctcctgagagcacactgttaaatattcaggaattttgcaagtcagggagtatttacaccacagacactggcaaatgtttcaaattaagggttctctcctttccccaaccctctaagggagccagcactcctctgggtgacagggacaaaaggagaagatggtagtcccagaaccaaacagctgggccatccagcagaagctggatcatggtcggaggactcttctaggcaacatttccagccctgcctgcaactcctctatttctcctactcctaccagatgggtcctccaacctgcctcagcctcccaaagtgctggaattacaggtgtgagccatcatgcctggccggaaatattttcattaggtgaaaacttacagtaaatctttaataatggccatgatttttattgacagaaaagagggaagaaaaaaaacttgactttgaaatacattacaaactgagagtttcatttcataccctttcattttcctaatttaggatcatatcctttaaaaaaatccctcttcatcaactcctggctatgtaatgatggcaatatatggtgacagttaagtgtaatgataatttagaatgctttccatcttccatcgaggagtggaaataatatcttcctgctttctggtgagtcctgatgtgttcactagctcctggaactaagcatcataatcaagtggtacaaacaaacacttcttagacagtcagaaggcaaggactcttatgaactaaagacttatattcagttcactggagcatatgctctattcctgggcatgcctgggtagaatcaagctcgtgagtgtgtggcccttggcagtgaccctatgattggaggagtacttgttctcattgggaacacccaaattatactccaaacttctaggtggttgcttcaatcaccattaattcaattttttcattgaattttaatacacaatcattgagatctttcttggaagctctaagtaattctgaaaactacctacctttggatcaattccatatggaagcatgttatgatgaaccatgggctttggtgagttgttggtaattattgttagtgacgatttgtgcggttatatgtaacacatcaattatcagtggactctactacaagattattgtttgtagtaataatatatccatatagtgttttatattcacaatatccatccacttatgttatttcctgctgataatagctctgtgaaaaagcaacacagctatttaaccccagcatgtattgagcactatggcttgtgtcctcaaagacctcagtgtccagtaatctcaccctatcttagagacagagagctggggtctcagacagtcgtgtgaccttgagaaagaggacactacatgaaatcttgacttaaatctttttctttccctgaatgtgtggtaggaagaccatctcaagggtgcctaggttacctttatgtggagggggcctaaaataaatcatgccatagtggtggttgtactaatttacatccccaccaacagtgtacaagggttcccttttctccacatactcaccaccatttgttattgcctgtctttggatacaagccattttaactggaatgaaatgatatctcattgtagttttgatttgcatttttctgatgatcagtgatgttgagcaccttttcatatgcctgtttgccatttgtatgtcttcttctgagaagtatctattcatatctttcacctattttttgatgagattattagattttttttcctgtagagttgtttaaactccttataattctggtgattaattccgatccctccactgtttttcattttctcttccccctccccactccacctacccagatgtagggtttggtcaccatatgacctagcatccctgttagcagcacagaagggataatgtgtgcccatgttgttgagcttgcccagagaagtgggctgtggaattttcttggctagagggcttgtggaagaagtcaacaaaacaggtttctctcatgcttgggataatagtgggccagcaccctttcatgtattaaaccatgaggataaaactcaaaataacaattttacctatacctaagatattcaattttccattgctccaaagcctagaacttttatgaaaatgggacaagcaatattaacatttatgtgatgaattaaagtagccatcaatctgtgttgatgccagttatgtattagttaatttacgtatattctatcctcacaattactctgcaataaaagctttactaactagaaaagatagctaaggcttgagaattaatacatcgcccagggtcatacaattagtaaacagtaaagctggaatctggttgcttccaaagcccatgttatttctgctttttcaaaggttgcaaacttgaatctggtggcctttctgttgtctgcagacatattttgtctggttttcacagtgttctaacaagctttgtagtaattgccgtaactcaaagatcatgagatttttcataaaactccagatttctggtttcttccaagcaaccagaaaatctggcaatgtggggtctttaatcctatggcaacaatgagctggtgataattagcatcttccctccttaacaaaatacgaggttcgtgcttgtgcctcctgctagccagcctgcttcactcacttgccctacaaaagtggcccctggaggcgtttgagtttagactacactcccacactcacttgactaggtccctgaacactgttaacttcccagttgtggacatagacgagagctagaaaatgaaaattaagtcaattaaaacattccctctggatatcacagacaagcttctttctcaaaagattttctgttcacactttgttgacttgcaaggtttggatgggtaacacccagcatgacagatgataaaaaaacgacagttttcttcacttgttcacaaagtttgcactgtgattttgcatcagactcccatttgggaaaactttgatgttgctttatacctcccccttaacacatccttaataagaataattttttaaaaaaacaaaaaagaaaaagaaagctgatcttggtgatattagaaatcttaccctgagtattgaatataaaagaaaacaaaatcaaatattacagccagataatattttctccttgttgcctggggtcatgtgcctgtgaccagaggctgatggttccatgatgttcaacttttaagtgatgcacttagatacaggaaaataagattactggattgcatatgtgactaattggattccttataagtaaaatctcaacattttcagtgtcataatgtctgagaacagaattacacaagaagggaaattcaggttacagatgagcaaaaagtatttgaattgaaatctgtgttgcctcttaattaattcttttgtatgccctgaagataatttcatcagccagaggaataacatctggcttcctgcacagagtaaaacatgacattagccttactcccatccttaggctgaagaactggcaagccacattctgggcattcaagtggagcattggtccccagcagtttttatagtgtaccttgagacccatgctggtcatttgaaagatggaattacagattggagaaagagtttgagagggcatgtacaattaggagtcttctgcctctagattgaatcaccttcaacatttcaaaggaggtatttttgacacttttcctgagtgcctatttgcatgtttaactagactcactattgataattatctccttaaaagtcatatttcctttgtaatttcaatctattttatctctttattaatgacaatgatgatttatttataataccttaaatatattgagagtacttaaacaatgtatcaggtactctcctaagcactttatatatattgtcatatttaattatcaaaactatcttgcaaattgggctcatctatattttattttattttttccatcctctttttttttctttaagagacagagtctctctctctgttgcccaggttggagtgcagtggtgcaatcatagctcactgcagtctcaaattcctgggatcaaagaatcttcctacctcaacctcccaactagctaggactataggcacatgccaccacacctggctaattttatttttcatagagatgggatcttgatatattgcttagctggtctcaaactcctggccttgagcaatcctcctgccttggcctcccaaagtgctgggattacaggtgtgagccactgtgtccagcctatttttttctatttttattgaggtatagtagacaaaaaaaattgtatatagtgtagaggcacagaggtgttaagtaacttgccccaggtcacacaagtggtaagtgaaggagcaatgacaaattgaacccagactgtctgacttcaaaactgtcctcctgctatccttcactgtcttcctctcagaataatgagtaccagactgtttgctatgcaccatatgctaagtcattacatgcatattcatataatcctcatgacagtattataagatagggactgtgataacccactctacaggtgagaaaactgacattcacataggaaatgtatatgttcaggtcacgagactagtgagaagtgggattaggatttgaactcagatctttgtgtctccaatacccatgttgtcttcatgacactgcacctctctcatccagttctctgtggaggcagaataacccaacgaattaccactagtctataaaattaatgtttttctctcctttggttctaggcatccaaattattcctttcatcaatgtcctcatctaaaaccatgtgtttcatgttaatctggagtacgtggtattgatattcctgcccgttaggaatctgccttcttttgtatccagcatttacttctattaagcctgtctttaaaccaaactcttaatcattcccaaaattaaacactcatttttctggccatggattttagagcaagtattcctgagcattttgtagagaaaaattatgcttaatgtctaagatcataaggtaaataaaggtcatggtgctgatggtccctgatctcaggatggtgaaataaggtaaggcatccatgcctcttaaaatgtggcaccaggaggtatcaagtacaatggaggatttcatcaagggagaagatagtggagcaatgacatcagggacctgcactcttcacttctgttaataccttctataactccattaagaatggtcatgtggtttgtgatcaattaaaactcagatactttctgtgcaaactgtgccaagacaagattttgctatttgatacttgtgcaattattttttttactctttacatacatattttccctattagagttcacctttgtggtttgtaggggatgtacattgtttgcacttcaatttctcatcttttgtgttacttaaatctcccaggtttgtgctattagtttggtttcatttaatagtattggtttaaagaatatctgttaaacataggatttgtgtttgttgtgatgctatgatagtaatcggagtgaagcccatacaatagctacagtttgtatgctgccctttttatcatttcataataaagaatatatgtgtatatatatgtatattatcaaaattagtcataaacctcattttaaatgattgtataatatttcacatacaaaatctaccacagttggttgaaccagctttccattattggatatgaattttcaaagctttgctattatgaataattacaggataaatttcttatatataagggacatctggccccaatcaccctgtatttgagatttttttttttcctagaagtaaaattatcatgataaagagtaggaacattcttaaagtgatccgcccaccttggcctccactgggattataggcgtgatcccctggccggggattagataagttttttagccattgaaattcctggaaggaggattgaagtttttcattgtttatttgaaccttgggacacaaacagttctcagcttctccaatctgattcaccaaatgttagcttgaatttcaaggtttccaaattgtgtcctgaggtagcctaattacttcagaggtactgcaattatttgtttgaaatataaatacaatttcttcctttttatcaactttagtgagatgatttacatataaaatatatcaaaatgcattcattttagatgttcagcttgatgaggtttttcttttcaaatggattaacttgtagtttagtttgttagtataaattttcatattcagtttatgaaaaacaaaaaaaataaaattaactcaggatcaagatgaaaaattaatgtaaaattattttgtagaatggttatttttaagaaattacttttaattgacacattgtaactgtatatattgatgggggacaatttcatgttttatataattatccagtcagagtagtatatgcttcatctcatgcatttatcatttattttgtggttagaattttcaaaagcctctcctctagttattttgtaaaaaacagcattttactgttaaccattttcactctactgtgcattaaaacaccagaaggtattccttctaactgcaactttgtacccattgaccaacatctcatccactcctctctcctccccttctcagcctctggtatccactgttctactctctgcttctatgataccaactttcttaaaaaaagattctacatataagtaagattagacagtgtctttctgtgcctggcttatttcacttaatatgaagttctccaggttcatccatgttgatgcaaataacaagatttcactcctttctatggctagatagtattctgttgtgcaaatatatcacactatcttatccattcattcgttgttggacatttaggttgactgaatatcttggctattataaataatactgcagtaaacatgggagtgcagatatctcttcaacatactgatttcattttctttggatatatgcttggtagtgggattgctggataatataatagttctatttttaattttttgagaaacttcatactatttttcatagtggctgtactagtttacagtccctccaatagcgtgtaagtgctgcctcttctttacatccttgccaacacttattttcctttgtcttcttgataatagccattttaactgggtgaggtatctcattgtggttttcatttacattttcctgataattagtaatattgaacattttaaaaatttgctggttcatcatatgtatgtcttcttttgagaaatgtctatttaagtctttgttcatttttaaatcacgttattttttttaatgttaagttccttatatattctgaatgaatattaaccctttgttaggtgtctggtttgcaaatattttaccccattctgtaagttgtctctttactctgttaaaagtttcctttgctgtgcaaaagctttttagtttggtgtaatcccatttgtatatatttgcttttttctcttgtgcttttgaggtcaattttctggactagtttgaggagaattggtattaattcttcttaaatgtttggtaggattcagcagtaaggccatcaggtcctgagcttttctttgataaatgtctttttattactcactcaattttttcacttgttattggtctgttcagattttctgtttcttcataatttaatctaggtaggttgtatgtgtccaggaatttatgtatttcttctatgttatcaaatttgttgtcgtgtggttgttaataacagtttagactatctaaaggttttgtcaattttatctttttaaaaaagtgacttcatttcactgatcttttgaatcttttttttgtagtctatatattgtttatttctgctctgagctttattatttcttttcttctatcaattttgcctttagtttgttcttgtttctctaagtttcttgaggtgcactattaggttgtttatcggaaatctttcttcctttttgatgtttcttaccataaatgacccttttagaactgattttgctgcattccacaggttttggtatgatgcatttccatttttttatgtatcccaataaaaattttaatttcctttttaatttcttcattgacccattggttgtttaagagcgtgctgtttaatttccatgtatttgtacagtttctgaagcttttcttgttggtttctagttttataacattgtgatcagaaaggatacttgatgtgatctttatatgcttaaggcttgttttatggcctaacatgtgatatatcctggagaacattccatgtgaatttgagaataaagtgtattcttcagctattggatgaaatgttctgcaaatgtctgttaggtccatttggtctattgtgcagtagaagtctgatatttatctgtcaaattgtttgtctcgatgacctgtacattattgaaagttgggtgttgaagcctcctacgattactgtattgctgactacctctccttttaggtctaataatatttactttatatatctgggtgctctggcattgagtgcctatatatttacaattgttatattctttgttgaattgattcctttattataacgctcttctttgtctctttttacagttttctacttaaagtctactttatctgatataagtatggctacacactttttgtctctgtctgcatggaatatcttttttcatcccttcatttttagtctatgtttgcctttaaaaatgaggtgagtctcttataggcagcatgtagctgggtcttgttttttgtcttttaacctattcagccactctatacattttaagtggagaatttaatctatttatattcaaggttgttaataatggataaagggttacttccactatttttagttgttttctgatttttttaaaattctttcttccttcctttctctgtcattgtttcatctggtttgttggttttctgtggtgctaagctatatttccattctctttctcatttgtttatctgctgtaatttctttctttgtagttaccatggggctaatacaaagagtcttgtagttaaaatagacgattttaagctgatcacaacttaagtttggttgcctaaagatactctagacttttttctctgccctccatttatatttttgttgccttaatttacctttaaaaaaatccattatgtgttccttagtcactaaatgtagcttttgttgtttttgactattttgactttaaacctttatagtagaggattaagagatttatatagcaccattatatcactggggtattctgagtttaatttataaattgacctctgctggtgagttttatacttgcatgtgttttcatgatagtacttattgttcttttatttctagctgtagcatgcccttaagcatttcttgtaaggctggtctactggtgatgaattccctcaacatttgcttgtctggaaaggtctgtatttccccttcatttctgaagaatagcatttctgggtctggtttcaaggtggcaccgagctgtagcagcttagatcatgagggtaagaggtagttaagctggcttccacattggtggcaatgcagctatgcaaatattggatactctgcaaactgaatttgggaactgtgaggattcagaatctctcctatagcaaggatttttataggggcagtggggactgtttggggatctccagcttaccttttttcttgtaagatggagtcccgtgaactctgagctaatcttggcaggagagacagtgtggcagaggtgagactctttgcctccctctctacggtcctatcctgggctttcatactccacagagattttttgccattcccatggtgcccttcagtgtacttcttcagttattctagttgaaaagtagttgtttattggttgtttttgtctctttttgtggaggtgagatgagcaccaggtaattctagtcagccatcagtcttgcttaagccatgtaatcaaatgcccattgatgatagactggataaagaaaatgtggtacatatacactatgaaatacgatgcagccataaaaagaataaggttatgtcctttgcagaagcgtggataaagctggagactattatccttagcagactaacaccagaacaggaaaccaaataccacctgttctcacttacaggtgggagctaaataatgagaacacatgtacacatagcagggaacaacatacactgggggctattggagggtgaaaggtgggaggagggagaggataaggaaaaataactaatgggtactaggcttaatacctgggtgatgaaataatccatacaacaaatccctatgacacaagtttacctgtgtaacaaacctgcatgtgtacccctgaactcaaaagtttaaaaaaaaaactcgtagcttgatgagttttgattaatgtatacacctgtgcaaccactatcccaattatagaatattttctaaaatatattttaatatttaaaatatgtaacagaaaacaacccacatacctaaattttatttctctccagctttattcaggtgtaattgttataaaaaaaacttcataaaattaatgtatacaatttggcaagtttggatatgtgtgggcactcatactggtatcaccacaatccagataaaaaatatatatatatccatcatcttcagaagtttccttgtgtctctttgggtttttgtttgtttgtttttctgctaagaacccttaacatgagatctgtcctcttaataaatatttaagtacacaataccttattattaactataggcactatgtggtacagcacatctctgggaattactgtaattttgcaattattaaacaacaacttcctgtatgccccctcctcatccctgggtatccatcattcttttgtcaacttctgtatttctgattattttagatgtctcttataagaggaatcatgcagtgtttgtcctgtgactggcttatttcacttagcatcatatctttctgttccataatgtcttccagatgcaaataatagatgtttcttatttttcaatgctaggtaatatttcattgtatgtttatacaacactttctttgcttattcatctgttgataaacatttggattgtttccatattttggctattgtgaataatgttgcaatgaacatgagaatacaggtatttcttcaagagcctgatttcagttcttttgaatatatacccccaaagtgggattgattaataagatgtagttttctttttaattttttgaggaaccgccatactgttttccataatggctgcagcgttttatattcccaccaacagtgtataagggttctaatttctccacaatctcactaatggtaggttttttttttctaaaaaaaaaataataatgcctatgcttacaggagtgaggtgatatctcattgtgattttaatttttatttccttgctgatgagtgatgttaagcacgtttttatatacctgttggccatttttatgtcttctttggagaaaagcctattcaggtcctttgcccatttaaaaaatcaggttatttgtgtttttactattgtgttttatgagtttattatatattttagaaattaattctttttagatatatgatttacaaatattttatcacatatcatagattcccttttcagtctattaactgttttctgtgtcgcgcataaactttttggtttgacactatctcacttgtctatgtttgcttttggtgcctgtgcttttggtgtcatattaaaaaacattgcacaaatcaattttgataatttttttctatattttcttgtagtaatttttcagtttcaggtcttatgtttaagtctttaatccattattagttgattttgttatggtgtgagataaaagctcaatttcattcttttgcacatggacatctggctttcccaataccatttattgaagagactatccttctccattgtgtgtccttggcacccttatcgaagatcagctaactgtaaatgtgacaacacatacacttaaaggcacagatgcctttaaagtgaagatgccactaattctcagattgtgttgccattggttgacattacagtaaatgacagaactttcaagttatactaaaataccactcaaaactattaaacattttggggttctgtgaagggggaaatatggtttcattactaaaaaatatttgaaattcagaaagtggcataagaagaaaaataaactcttggctggtttatctcagaatgaaacttaactatttgtagtgtgatccaccaggctttcattcaacctgaaattagtttgctaaatgacttaggaggctgttgtagcagcctggcttgatctgaggtcagtttggaaacaaggcagggattcaccacaggttaactgtgtgaccttgggaaagccacttaacatctctgagccttttatattactgcatctctgaatggttgtcaagattaaataattggctaacaggataatgaaggggctgatgctataagccctggaatcacactgcttggcttatccatgtgaccttttgtaaatgtctcaacttccctatgcctgcatttgatcattagtaaaatgaaggtaacaacaatagaacttattccatgggtttattataaggatctattgagatgatgcttatgaattacttaatatagtagctggtgcatagtgaacacttaatagatattcaatacttttatattaaagggagataatgcatgtaaaactaatgtgagtagtggatcacttagttctcagtatgtaaaagacattatcagataatacttatgtcgaggtatgtttaatgccagagataagcttttggtctgctggccaacccaagtattcttgggtccatttatctttgtaaaatagagaaattttagtaagaaaatttaacaattctctaagtgtctgccaagtttcttactaagcactttgattgatctgtttcgactttcctagtgggaaattatctaagtctccttatcccctccactctctgcattttgaagaagataaatagacttggagcaacttcattccacttgtctgtgttctctaatctacggactcgaaatctcagagaagccatactgataaccttcccttcccatctttgcttctgtgccaacgttgtcccccactgtttgtcagttttagaagagaagtaacaagaaaattcttcccttctggaaactccagatgttcttggggtcagtttataggctaattaaatattttatcttgatttaagatcagaaatgttcaactccctatcttggatagtctgttttcaaatactatatttcaagagctccttttcgtcggagtagttagtcctagagactttttttttttaacccaaagactagttcctgttgaaagattatggtcttgaaactgtgtatcaaaggaacaaaattttgttaccttttcccctactttgatcaatgttggtcttttcaaactgaattctggagaaactaggatttgtaattggggagcatattttagcctacctcaattgaagatttgcttaatctagtttcttccaattactactgttatgtgacaattaccctgaaatgtaataggttgaattgaagcaaccattttattaagctcatggattctgtgcttcaggattttaggcagaacacagtggattacttattccagttccacaatgtctaggacctcagctgagaggaccagaaggctggggataatttattggccagagtttcagatcgtgtgaaggcatcttcacccaagtgttaggctaggacttccagttggagcacctacaagtgaacttacctacatggcaatctctcagggtaaggacatagaccctccttcttaataagaagagtgtcaactttttgccacatagttaaaccatggactatacctggaaacattagttaactaaggagcccatcttattgtcataggttctataattagtttaaaggatgtggataagaggaacataggcatatttacattccaattcttattgagggagttttctcagaagcttgaaagatgcaaatgtagggcttgaaaaggaaggactttctaccctgaacattaaacttaggaaatgcatggcctgaaaaagtacaacaagaagaaaatacaaagtgaagtctaccacctctggaaataatagagaagaagaagaaataaaaacagctagtatcttcatagccctcctacatttgttttttcactgattcctcacaatacagcctactgaggtcagtattttcattgccattctacagatgagagaactgagattcagagatgtcataataatatttctgtattagtctgttttcatgctgctgataaagacatacctgagactgggcaatttacaaaagaaagaggtttaattggacttacagttccacgtggctggggaagcctcacaatcatggcagaaggcaaggaggagcaagtcacatcttacatggatggtggcaggcaaagagagaatgacgaagacgcaaaagcagaaaccctagataaaaccatcagatcttgtgagacttattcactaccatgagaacagtatgggggaaactgtccccatgatttaattatctcccactgggtccctcccacaacatgtgggaatcatgagagtaaaattcaagatgagatttgggtggggacacggagccaaacaatatcattccacccctggcccctgccaaatctcatgtcctcacatttcaaaaccaatcctgccttcccgacagtcccccaaagtcttaactcatttcagcattaactaaaagtccgtagtccaaagtctcactggagacaaggcatgtcccttctgtctatgagcctgtaaaatcaaaagtaagctagttattccaaatatgatgggggtacaaacattgggtaaatacagttgtttcaagtgggagaaattggccaaaacaaaggggctacagggctcatgtaagtccaaaatccagcagggcagtcacatcttaaagctccaaaatgatctgttttgactccatgttacatccaggtcacactgatggaagaggtgggttcccatggtcttgggcagctccacccctgtggttttgcagggtacagcctccctcccagctgctttcacaggctggcactgagtgtctgtggcttttccaggtgcacagtgcactgtcagtagatctaccattctggggtctggaggacagtggccctcttctcacagctcctctggcgatgccccagtagggactctgtgtgggggctatgaccccacatttctcttctacattgccctagcaaaggttccccatgatagccccacccctgctgcaaacttctgcctgggcatccaggtgtttccgtacatcttctaaaatataggcagaggttcccaaacctcatttcttgacttctgtgtacctgcaggctcaacaccacgtggaagctgccaaggcttggggcttgcaccacagactgtctatatttgaattccaagctccacattggcccctttcagccacggctggagcagctgggacacagggcacgaagtccctaggctgcacacggctcagcttggggaccctgggcccagcccatgaaaccacttcttcctcctaggccttcaggctggtgatgggaggggctgctgtgaagatctctgacatgtcctggagacatttttgccactgtcttggggattaacatttggctccttgttacttatgcaaatttctgcagctggcttgaatttctcttcaaaaaatgggattttcttttctattgcattgtcaggttgcaaatttttcaaacttttatgctctgtttcccttttaaaactgaattaatagcacctacgtcaccttttgaatgctttgctgcttagaaatgaaattggaaatcatcattctcagtaaactatcgcaagaacaaaaaaccaaacaccgcatattctcactcataggtaggaattgaacaatgagatcacatggacacaggaaggggaacatcacactgtggggactgttgtggggtggggggagcaggagggatagcattgggagatatacctaatgctagatgacgagttagtgggtgcagcacaccagcatggcaaatgtatacgtatgtaactaacctgcacaatgtgcacatgtaccctaaaacttaaagtataataataaaaaaataaaaaaattaaaaaaaatttaaaatatgaaaaacaaaaaacaaaaaacaccatcctttgcccactgcaacaggtgctgtatttgtcataaatcaaataatacttgcatgggtctgcatctattaacctattattactataatactatactatcttaatttttataaccttaaaataaatcttaatattcaacagaaaaaaaaaaaaagaaatttctcccaccagataccctaaatcatctatctcaagttcaaagttccacaaatctttaggacaagggcaaaatgccaccagtctttttgctaaaacataacaggagtcacttttgttccagttcccaacaagttcctcatctccatttgagaccacctcagcctggaccttattgttcctatcactatcagcatttttgtcaaagccattcaacaagtctctagaaagttctaaactttcccacattttcctgtcttcttctgagcactccaaattgttccaacctctgcctgttacccagttccaaagttgcttccatatttttgggtatcttttcagcaacactccactcttggtacaaatttactatattatttcactttcacactgctgataaagacataccagagactgggcaatttacaaaagagagagatttaattggacttacagttccatgtggctagggaagcctcaaaattgtgggagaaggcaaggaggaacaagtcacatcttacatggatagcagcaggcaaagagaggaaaggaatatgcaaaagcggaaacccctgataaaaccatcagatcttgtgagacatgttcaccaccgtgagaacagtatggaggaaactgcccccatgattcatttatctcccaccaggtccctcccacaacacgtgggaattatgggagtaccattcaagatgagatttgggtggggacacagagccaaaccatatcagtttccaagatcatatagtcaatatgagcggaacctgctctctgaaacactctgacttcagatttcagatcctgtggtcacactatgagtcctctcctgctggtgcccaccatgcctagttctgcccccttcctagagactagtgtacccattgctgtgggagacacctacttctaaacaagcatctccatctctgacatttggtcatttccttgtccactctccatctactacttgagattttcccaattacattttacaactctaataaatatttcctgcaattcaatggccagaagcagttcatcctgtagatgaaccgtgatttacctaccagtccatagtggtgcacacataagtgattcattctttaactcattcagtaaacatttattgaattcctattatttaccaggcacttttctaagggctgaggatacagaagggaacaatacatggtcccagcttttgtgctagtgggtagaatagaaaatacacaataaatgtgtaacacattggtaaacaatggtaagtgaaacaaaaataaagcaggaaatggggtagtgaatgataggggggcttgtttaaaaattatgaccaagaaaaacttatctgaggaatatctgcacagaaatctgaatgagtaagcagtgagccatttgtatataaggacagagtattccaacagaataaagggcaaaggccatgacacgggcatgtgcttagcctatttaaggaataaagtttcagttatgcaagatgaaaaagttgtagagatcttctgtgcaacatcatgcctacagttaacaatactgtattgtgcatttacaattttgtgaagagggtagatctcaagtgttcttaccacaataataaagaagggcagcaaggaggcagggaagttatgaggcactggtataagaaagcaagagtgagagaaaatgatctcatagaggcagctatggttcaaattatgtagggctttttaggcaatggtaagtgtttggggttttattccatatgtaatgggaggccattggaggatgaaagtacaactgcttgtgatagatcgtgtggagagacaaaagtgcatgttggagatgactcaggaggctactgcatttgtccaggtgaaagcactggtagtttggatcaggtaatagccatggagaagataacagtggttgaaaatgagctgaattgtaaaagcacaccccatagactttgctaatgaattgaaagtaaggtatgagagaaaatgaggagtcaagaatcattccagagggatgagcaattgggtgaatgatgatgggtaacactgggggaggggcaggttgtttccagattgaggttgcatcaataattctaccatgaacatgcttccaatgttgagagacaatatggagtactggtacagtgtaacttcagtcacagactgtctatactttgagttccagctctattatttataggctataagttcttgtagaagtaaattacctccattttctcatctatttaggttggtgcaaaaataattgtggtttttgccattgaaagtagagcagaactggcctggcatggtggctcacgcctgtaatcccagcactttgggagcccgagtcagacggatcatgaggtcaggagatcgagaccatcctggctaacatggtgaaaccccatctctattaaaaatacaaaaaaattagccaggtgtggtggcgggtgcctgtagtcccagctcctcaggaggctgaggcaggagaatggtgtgaactcgggaggcagagcttgcagtgagctgagatcgtgccactgcagcctgggcaacagagcgagactccgtctcaaaaaaaaaaaaaaaatagagcagaactgcaattacttttgtaccaagctaataaataatgagaacaataaaagtacttacattgtagagttgctataagaatttaatgcacaatagtgtctaacaccattatatagctgttaggcatcaatattatcatttatatatttaagtgaaatatgattgttaggaagtgctgggttaaaggatattcatattgggtaagctttacaaattacccaactgcctatctggaacgatcataccaatgtgttactacaagaaatgcaaataaggcagttctttaaacaatattttaaatctttatagtttaatattagactcaatgactcttgcctcagtcatacaatgaacacttccttggcttggcatgagttgagctcacttaaatgattctaattgcatttgtatctttcttccaaaattatctttatgttaagaagtttattaattatttacataatataatatgacacatataaaatactaatataattaaaccataacttattaacatattatacagtatgtgtgagtttgtgagagagatgtaggttgtgtgtgtgtgtgtgtgtgtgtgtattagaactgaagaatgaattgaagcatctctaggttgtcagtgttaattctgaaggatcgctgtacttggtgctgtgccttatttaaagagaggaagagaaattgatttaataacctgtcacattatacaacacaagaagaacttgagaagaaaaagcactctggtattcttagtaggaagaaaaatattgtgacagctccatggagaaatctttgtgtgcagagaactggtagaaattatggtgatgagttaaggatgttagaaaatatattgctttcatggaataaatttgaccacttcaccacaactgcggaaggctgtttccctctcttacgtaaggggagtaaggaaatagaagctccaattgttttttccctttttctcagttcttaaaaacgattcattctgccattttctctggagatttctgaaatattttatttaactgaggtggtatagaataacaacaaaatataataatacgacagacttgtggagtttaagcaaaagagtttaataccttaatgttaaactctggcatcctggagaagccagattgtagtttagtgaataataatattagagaattgtcaataccttccagccaaagaccaccaagaacacacctataattgaacaagttgggtttattgctcactaccacggggagaatacacctcatggggaactgtgaaatatcttagtcaaagagtttaggaaagaacttacagaatttgagttagtggtttagggaaggtttaacaaaggacagctttattctggattagaagttgttgagaggccaggacaattctatgattgagtaccttaataaatcttatctagaagaaggggagaataggccaaggctaaagctaaaggtataattggtaaagaagcagcaatcactcattttaaccaggatagggagatgtttggttattgttgtgttttggacagcgttcaggtttttgtctggctccagcatgattgtggaacagtctggtttttgtctttcttcatcatggggatggagtgtccttgccttatgttgatgttctgtgaacattttctttgtttcacagaaaacactaaagctcagctgtgagtaccgggccaatttcaagcagtacaaggccaggctgatagcactaagtcagctcccagatggcagaggctacttttttcttagagtgcaacctagaaattaagctgttatacttcaaaaacatcttcctaacaatgggccaacttgttggctaagcaaagaaaaatctattataacgcatcttgtgttcaaagcaacctatttctcagctctcttatctaaagaatggtacttaatgtttgcaatgtacatgcattccataagtttatttttctcttcaatttaaccccaaatctgccttctactttttctttatctccctgatcagagttagaggtaaaattcccaggagctcttttgaatacattcaagtctctgctcatctctcctacagaaagcttttaaagaagccctctgagtctcagacagggcatgagttttcacaagggatctggccaggagaatgtacctcatctttaaaaaggcagttggatggcttcacttcagctcccacttcattgtgatttggggaaagtcatcattttcaattttgatagcatcacctggtcactgacattcattcaataaatagttgttaaatatctaccatatgccgccgggggtggtggctcacgcctgtaatcccagcactttgggaggtcgggcgggcgtatcacgagctcaggagatcgagatcatcctggctaacatggtgaaaacccgtctctactaaaaacacaaaaaattagccgggcgtggtcgtgggcgcctgtagtcccagctactttggagggtgaggcaggagaatggcgtgaacccgggaggcggagcttgcagtgagccactgcactgcagcctgggcaacagagtaaaactccgtctcaaaaaaaaaaaatatgtatatatatatatactatatgccatggaccgtctttgtcatgagatatgagaatgaacagttatgatccctgtcctcatgaagctcctattctaaaagggacacagagatgtatgaatcaatgtttttttaaaggtttgggtaggggattcaggggaaagcatattcaactttacattgggaagaggagcccaggaaatttttatagagaagatattacttgaagtagatctttggtaatgagtctgccaggtatataaggtagagaataacactgtctagaaagggaaaattatgctgtgtgcaaaggtctgacctcaacaggggaatccaattcccaatctccaaagcttgaaaattctaatgacaaatggttcttagtaggaccttataaaggggtcatcatcttcttggctagagctctgcctaagccatacacccagaagataatatctcttctatttttaaaagaccttttgagaaggggagtctgtagtcatcatagggggccgatgggctttgaattatggaaactttttagcacagatggtgttcaatagcactcagtggggagaggaagggatgtttcaggaggggtgggggacagtttctgagggtttaatcctttgaataaagaataaccctgatacagccttaaacctgaattagattgcttatgtgccagcattttcccattaatttatcatagaagatagagtatgttaatgtcgaataaatcagctggcttcttttacgtgttgagattttggggaaggatagagaagcttagggaaaaagtcattaatggaaacacacttacattagttgcatgatttcagccttgttatgtatatccttattcatatatctcccatagagttccatgctcatttcattcactttaatcacagttttgtctcttagacaatctcatacactccatgtgatttttactcactgacaaactaacaaacactctgagtatgtctctttctagcacgcacacacacacacccttatgcacttttagattcagttcactaatagttaagttagtaggcttaccaaatgaaacagacgcacgatatcaatgcaataggagacagcgtcagttgtactttcaatggaatgttccaaactaaacaaatcaatttcttagaagttatttattcaaatactaagggtagggcaaggtaagtgtcatgagggtgagacctttgtcattgaatctccagaacctagaacaaggcctggcacctgattggcactaaatatttcattgcatgagtgaatgaggttccttcttgctgtatttgattgtttggaaggtctgtatatagagataagcgcataccccatctagttgtagcatatctattcttaatggaatatcttatttccttatagcaaacgggttaagaatgtcttcttgttatttgaatcatctaatcagcatgagattttgcccaagtctttctttggaggaatgtcctctgataaatttttcagattaattatttttattttataaatcctaactgtatagctaaataaatttccagaaaatgaacacacctgtaaaaccagcatccagattaagaaacagaacatcaacagcgcttccaaaattcctcttttgcctcttctgtttactgcccctcattctgtgccaggagtaaccactcttctgactcctatcaatgcagattattttttattatctttgacttttatgcaaatatatatcataccgcatgtgctctttagtgtctggcttctttcatctaacactatatttgcgagattcatggcattgcatgtagtcattcgttcattatcattgctgtatgctgttccattgtatggctaataccacaattgatttatctatcctactgctgatgaacataggggttgcttccagtttagggctattaagaattattctgctataaacattcttgtagatcatttcaatgagcatatggatacatttcttttggataaatacctaggaatgtgataggcgagactatgtttagctttagtagagattttcaaacagttttctacaaggtttgtaccaatatgcactctcagcagtagcatgtaggagttctgattgctccacatcttccccaacattttatattgcctgtctttttcatcttagccatcctggtgaatatgtagtagtgtctcaatgggattttaatctgcataccttttatgaataagaagatggacagttttatatatttgctgggtatatgggtgtcctattttgtgacatacctctgtgtaataaatgtttcatttaaagaccagttgcatgtccattttgtatatgtgtccccaacctcagcagtcattgtccttttaacctgttttcaatttactcctacagtcattatcataatagtagccagtggcctattaattctcagctattatagtcatatttttttcattactatgtattgtggagctttatactgttacaattattacttatattattagtgatatctttttattcaaaatactattcttgactcatttttattataatcatcatccattatgtcataggcttcatagcaatcaacattgcatccctgtacccgctaagaatattttcagctacgagtatcagaaaactaggctagaggatcttaaacaaatagggtttttcacatgtaacaagaagtttctggtttgcgtcagctgctccatatcaccaccaggagcccagattctttcttaccttttttctcccctccctagagagctttctgcatttttgtgttcatggttgttgccccctggacacagaatttgacagaattgccaaatgtatcgacattttaggcaggaaaaattgtaacgggcagaaggctgtatcatccatgtctggaatccttttttaaaggacaaaattttgtccctacaacactgctcagttgatttctgcttatatctcaatggccatttaatggccagtgtgtcactggttactactagatgcaaaagaggatggaaaactaatcattagctttgaaactcctaaagcagaggaaggcaagggagaaggatgccggtttggtgtcaagaaaaaaaaaaaagtacattatttgctgtagattgttagagaaaagaaactacaaacagcaagcagaatcaactcatttttagccttggggaaaatagcactagaatggttttggaaaaatagataattccctgtgctggtgctggtgcatcttctacatggtactcactgtgatttagggagcatttgctgtgtgattcctagcaggtcttctggttagtgatgtactcacacttcattaggccctgccaccttttgtcagttactacatagattaacctttagcaaaattggtgataacacacacacatgtgcacacactcaatgaaacagagaaaaagaatgtctctttctttctttctttttttttttttttgagacggagtcttgctctgtcgcccaggctggagtgcaatggtgcgatcttggctcactgcaagctccgcctcccgggttcacgccattctcctgcctcaccctcccgagtagctgggactacaggcgcccgccaccacatctggctaatcttttctatttttagtagagatggggtttcaccgtgttagccaggatggtctcgatctcctgacctcgtgatctgcctgcctcggcttcccaaagtgctgggattacaggcgtgagccaccacgcccggccgagaaaaagaatgtctcataataataaaacattctcacaaaaaataaagagcatgcctttcatttggttgtattcgtatttatttatttatttatttatttatttatttatttatttattttgagaccgagtcttgctctgttgcccagactggagtgcaggggtgccatctcggctcactgtaacctccgcctcctgggttcaagcgattctcgtgcctcagtcttctgagtagctgggactacaggcgtgtgccaccacacctgaccttgtagtttttttataaactagataaatattatgtgtttttgttattggtaaatatgggaacttctttacctctagaaagatggctcatttctattttaactgcactgagtatttacaatgaaaattccaaccaacaaaaacctaagaaactgtttaagtttgtaaaagccctatgaaatttctaatgacaaatggcaaattggtttcttaaacagattgtctttgtacaacaccccaaagatttagtcttttttttattatactttaagttttagggtacatgtgcacaacatgcaggtttgttacatatgtatacatgtgccatgttggtgtgctgctgcacccattcactcgtcatttaacattaggtatatctcctaatgctatccctcccccctccccccaccccaggacaggcctgggtgtgtgatgttccccttcttgtgtccatgtgttcacattgttcaattcccacctatgagtgagaacatgcggtgtttggttttttgtccttgcgatagtttgctgagaatgatggtttccagcttcatccatgtccctacaaaggacatgaactcatcattttttatggctgcatagtattccatggtgtatatgtgccacattttcttaatccagtctatcattgttggacatttgggttggttccaagtctttgctattgtgaacagtgccacaataaacatacatgtgcatgtgtctttatagcagcatgttttgttttataatcctttgagtatatacccagtaatgggatggctgggtcaaatggaatttctagttctagatccctgaggaatcgccacactgacttccacaatggttgaaagatttagtcttttttttttaagtgataatgtatctatttagtgccttctgtgacaaatgcctcatgctataaagaaaactcatggatttcagagtttaaaatttaaagatgaaatcccagatattttacttacacattgagtggggctagggaagttgctcagtatctcagcctacagatctctggtttgtacaacaggagtattgcctatttcatagatttattgtgacaattaaagggtatcatgttatcaaatctccttagtcaaggccagattgcaaaggctttaaatgtcagtgtagagatcttacattctgtggagatttggggtctgagatgtagataggtatgtgagaaatattcatcaattatatacacgtgattttccttttttaatgtttaatttgactttaagccacagttttttccaacgtttcccattgtcacaaggaactccagatgtgaatgtttaaatttcatttttttaccatgaagttgtaattaaatgatttcagtgaaacaggtttttaaatgaagtgaatatattaaatataacaatgaatatgaagtagcatcattttattttaaattcagcccaatttatctgcagaatgttcagatacataaattcatttaatctctacagcaaagttgtgaagtcagtggtgttaccttcatttctagtaaagaaaccaaaacttagagaccttgtgattttaccagggtcatacaaccaacagagagagttttcaggcctgggctgtatctcattccccatttttattcctcgtgtttggcccagtgcctggtatgtggtaggtgctcactaaatatttgtcaaagaaacaactgaggccaggcgcggtggctcacgcctgtaatcccagcactttgggaggccgaggcgggcgaatcataaggtcaggagattgaaaccatcctggctaacatggtgcaaccccgtctctactgaaaatacaaaaaattagctgggcgtggtggagggcgcctgtagtctcagctactcggggggctgaggcaggagaatggcgtgaacccgggaggcggagcttgcagtgagccgagattgcgccactgcactccagcctgggcgacagagcgaaattccgtctcaaaaaaaaaaaagaaaagaaacaactgaatgaaggaataagtaaatctcagaccccaaggcactgaaatagttttaaaattgagatgaaatgttcaaatggcacattccacattgaacaaacactttactgtggaggttgaatcatagatagacaaaaattatttggaggtggaggggaaggttatctagttttccactcctcttcccacagctgttctctcaggaatggcctgagaaaggagacaagaggacaggtagtgaaagaggaagccaaggagccagggagaaggtacacaggatgtactaccactttcccgctgtcctggggctcaatgcatctcttatcacactgtgagagtgataaggtccatttatgggtcagtcatccttctagagagtggacttctcaggggcagggactgggcattagtcattactgaattttcagcacatatcctggaagtcagggtttcatagatatttgtgaacatgaactaggcaaaaagatgtgctaaacgaagtgtttctcatacgacagaattttatcttctctaaataaagtctcaagaacaccagatgcctcagagtggtctcaagatctagttatagagccagtggggtagagcttgatctcaaagatcagaatattcagataagtaatcaaatctaagaagagggagggaagtaattcaggtttctctggccaaatctcagagcccagctttgccacagtaataatttccatccccaccatatcaatcagggtctagtcagaagaaagaaaccacacattattttaagagagataatttaatataaagaatcattcactaggaattaaggatgtgaaaaggcaaataagagcaactccagaaagcactgttcacccttgggactgggaaaacaaagagaaaaggttgagatggcatggtcctagccatctgagaattcccaatcttgcaatagttaaagtaaatggaatgatgacatagtgtgataagagctatcttttcattaaaagttgatatgtaggaccatgtaagatggtatcactatttattttctattaccgtgcaaaactttacctcaaaccttagcggcctgaagcaagaaaaatcatgtattattgctcacattttctgtgggtgaagaattaagacagggcacataaaggttagtttgtctacatgatatctggagtctttgctagaaaatttgaaggctgagggacgaaattattggaagggtcattcactcacatgtgtgacatattaactgggggcctagctaaaggtgtttcccagaatatcttgacatggccttttcatatggcctgaacttcctcacaacatggtgtttgggttcccaagtcaattatcccgagagataaagagagagacagagagaaccagacagaagtcatactgctttttatacttagtcttacgtgatgttcaattttatgtgtcaacttgactaggtcacagggtgactgattatttctagaagagtatttttggatgagattaacatttaagttggtagactgagtaaagcagactgcccttcctaaagtgggtggaccttatccaacagctgaagttctgagtagaacaaacaggctgaccctcacccaggtaaaagagaatttctcctgcctaactgccttcaaactgggacataagctttatcctgcctttggacttgaactgaaacattgagtcctcctggttcttggaccagctggtcgtcagactgaacctataccattggctctcctgggtctctagcttcactgactcacccttgcaaatcttgtgaactgccagtctccataatcatgtgagctaattccttataataaatctctctctctctccttctttctctctgtttctctctctctctctacacacacacacacgcacacacatgcatacacacgcatacatcctattgattctgtttctctggaaaaccccgacaaatacatctgagaggtcatgcacttctgtcacactgttgtttgaggcagttacaaaggtccacccaggtcaaggtaggggaacaaggatctcatctcttgatggagacgtgtcagtgtcatggtataagaaggatatgtggggcaggatatatcttggtgtagccatctttggaaaatgtaatctaccacagcatcttacttagcctgggctggtatggggttcatagaggcgatagtgttcctgctggattctgaatgcccaggaggagctggtcaatgaaaaagagaagataatttcaggtacaaggtaaagtcagtcatagttccagaggtaataggtggatttatatctagaagattaccagtagctcattatgtttggttttctcgaatgttaagggtctgaacttaccacatccttattttttccacaagaaaaccgaagttggtatcggtcagactgaagatattactgttgagagaaatgagggtatgttattttgagactagttcacccactgttctcctacttcctgctctatctggacccacagaaaatgttgatacacttcattccccaatgaagcaggatagcgcatgcttccagggtgtgagcataaaaagctgaggaaaaagatgttaagatgtcagcaactctgctcagctagctgttttcagcattctgaagagcattctcggtgctgaaatctgataagacagccctattcttaaagatctccaagaagactcctcagtcatccttagaatatcttatttcaatttccagcaactcttcttatcagggcaaatcccactgattcttatcttttaaccaagattaccttccagggcacaggaagtcattctcctgttccatcttcagttgatggaattgtaagaccgttggccaccatcagcttggaagagatagtcataaatgtttttctgtttctagttctttctcctttacccttcttatttcatccagggattactttatacctctgcaatgtgttttcttcattcattccttcatatctcttttccccctactctgaactcttggaactttctccatggactactaaagtggcttaataactggtttcccaaactattgtctttccccaccccttatcacactaaacatcagtaggacctcttcatggaggatgttcaacaaaagcttgtgttcacctagaagacaattattgaattaccttccagccttctcttcttcaggctgagtaatcttactatccactcccccaccagacagtggctctatgtgcgtctctaatgtggcttagtgtgctatctgctatcctgagtctaatgaattccaaatagaaaccttctggtagcaccatcattaattagcatcctttctcagaacatctaaaagaagctggtttcgggggaacaatatgtcccaacaaaactaatgaagtttggaagttggctgtttataaaagaaggaggggaagaggagggggagaaaagaaaaggaggaaggagaaggggagaaagaagtggtgtagccctgctgtgtacttgttcatgcagagtttattggacttttctccttgacttcctttccctgttctttgatcccctcacccactaacttcttgtcctctcacctcaaaattgtaaccacttgtcttttaatgaccacattgtgccctctttgtgcctgattattagcagctaaagccctcatatcgtaaatctgtgtaagtatggcttctgtcgacaagaccggttgctccttgagggtaggaaccatatcttagtcatccttttaactctaaaattttagcacagtgtgtggcaaaaattagatgctgagtgaatatttcataactgagtggataaacaaattattaataagtggaagtgttttgcctgttttgggtaaggcagccatgtgagccctaggattgtatcctgttgtgattccactaagaggctcctggaaagttgcccatgctgtgtgttcttctgaggtccctctttttatcatccccaagtcatagcttagctgtcatttccttgaggaaccttccctatctacccacaacaaaatgttgctcttccttccttcttaacaaaattaaggaaccctaaatatgttcccttgtatgtctcatgttgtagacaatggcatattttactctttaattattaattatctgtattcaccttcaagctacaggccccatgagagaaaggcctattgtattatgcttttgtggtacttacagtgccaaacagacagcctggtatgttgttggctttcaaaacataaatgaaaatatgtatgaatgattaataaaagcaggattctttcctatgagtcttagtcttctctctcctctttttctccgaacatacaactgtaatcatctatgtagttatgattgtgctgtgaaaaaataaagtcaaaataaaatacaaaacatataatgcattgttcaaaaactcagcagcatcttttatttatgattttatctaaaaatgttccattattataaaatatgtagaagtgagggatacatggctggcaggtttttcttaagttatgaaaagctgagctaactaatgggcttcagccatctctgctgttcatagtgaatgggctatcacagctgttttgagcatcataggtgccattcatatactaagataatagtattactgttagaaatattgaagagttttatctacaagagaaaaaaattaatagtcctaataaaatcctgaaatattatttctattctttatgcttcagctgctaagggctgtcagagcacaacactacaagctaagccaacaatgtggagtctgggggctcactcagcacagtgagaagcaaggttgagttccccatcccttcattttctggaagtgataagatttgtccaggtgtttaaaaaaatgaaaacagacaaaaaccaaaagaactagagctgatatggaggggttgagagaatggggtgtgggaggagaaataaggacttctttttctatttcctaaaaaattccccttgaagtcttggcttatttcttaaaggctttgaaatgcacctcacagcaaccttggtaacgtggtactttttgatcatttgcctaacatttctgatactgcattctgatttcctcctagttcttacttagatactttggggagaatatgagtcctttacagaggtggtgtccaatatctactcaattctaaagagacggtcgttcactctaatttgtcataggaatgtttttctatgtggaggacaacatgagctactcctgcgatgttctaatcactgatggatgttccattagggtttgtctttcagcttacacctgccaatggttactattatctatttagagagaagtaggaagtgtgttgggcttaggtgtcagaagtgccctatgttcaaattttagccccattgaaattttcagcaaattattaaatctgtaaaataaaagtaataatttctataattgtgtcagttagaatttatttgggctgcaagtgaagtaaataaaagcattagttattgaaaccaaacataaatttatttttttcacatattaaagaattccagagcctgctaaagcagatgcatggagtcactaggaatcaaggttctttatccttttgcttcgccattctccacgtgcagttctaccctgtggttcaagatctacatgagctccacgtgtcagtctgcatttcagccagaaagaaaaaggaaggaggaaagatatgcatgcctgcctctctttaagggcctttctgaaaattgtaacggtgcttctgccagaacgtagagaggtgtcacgcctaactgtggtagggggctgggaaagataggctttacttcaggtggccatgggtcaagataaaaaatgagggacctatttaagacaaaagaaatgacatcaggggacaattaacaaatctttgctacctccatcatctgaatattgtgactatcaagtgagaagatttatacaaataaactttacaagttgttaaatcctgtatttttggcagttttcattattagaatatcattactactatattttatgggtagaaatgcagaaaaattaaagattgaaggaactagggttgtccatttctcaaacagcaattattaggtaaagtgtcattctggtgagttattgttgagatctgtcttatgaaggattattgtgaggaaaacacatcattcattatccatcaacgtagaggatgaagaggaccaagagagagatggttcatctctttcattttacagatgaggaaatgcggtcaaaagagaggatgttatttttccaaggctgtaaaattggttagtggcagaaccagaattaaaactcagcacccttggcagaatattcaatatcctgtccattgcatgtgccctacctccctcaaataaaaattatagtatgagggataattaaactatcaaaggcagttgtggtaggaaagttactagcattttctgagaacacaagggactggcatttgcatggagggctggacgaattgacctctcaaggagaccccccacccgcatgccttccttcaggactggagttaaaattcacagtggctcattcaacattgcctctgtgtcctttccttcttaatcatagaattaatattggccactctttggctataccttgatttaattcttatctaattcttaaaatctgtttaactttttgttcattctttgtttgctgcattctggatccagggttctcactttatcacctcctgatgttttttgtcaacttagcttttctgacctgctccgaacagctgtgccccaaagagcgggtgagggaaggcagttcctcctgtgtgtcacagccctctttacacctctttccccacattagggaaacctatttctatcttcaaaatgtaacctttaacttcttttatgaacactggcaacaaacttttaacacacttgcagccccaccagctgcctttttgacttctcacctgaatttctaaggactgctgctcactagtagttgcagtctttgtgttttatgcttggtgttttgttttaatgccaggtggtgtcttattcctgttttggccttttctctgttattctcttctgtgccctctttaatttaagatgactttgattctttgtcccagcaacgtgttctctgttgtgtcaggttgtatgcctttgtctttccttaatctcctctggcagactttattaattcgcgtaattttgctgtgctaagtgagaaatagtcactttacacaacagcaattaccttatgaatcttccctgtttccatgttatctgatctttttacatgtcacttatttttcttttgaacctggattcttcagcctgagtttatgtagcagaaatttctagtgcctacccgattccattgtttattttttcactgaaagaattctgcattgagggcatatgagagagaggcagtagtattcagctgtaaaattacagttttcagcctcccttgaatctagggctggccatgcaatggtgctcttaccagtaagatgtcaaacaagcctgagcaaacctgagcaggggattcctgaaaaagtttggcttcccatagatgtcagccttttcttcttgctcctttctcattcctcctctctggaactgggcacaaggaatgaagctgccactgtcatttttcaaccatgaaaaaggcccagaggatcccggaggcctcagccctagcattgtggtacactaaacgaatgccaataacttccttgctccggaattcctgttaaaagaaaaagcctgtgatgagtttgcatcactgttgtggagactctctcactctcagctgattgcaattcctaactgatcagattataactaaataagttcagcctttattttgggcactgtgatgtgccatccagatcctgtatgtggaagaatttgttgccttagtcttcggcagtattctcagcagacaatcttcagctgttagtcctttcagggattacctcagctccagagagcctccttacccaaagtcatgcaccttcctggagtggcccacaagcaataaatgatgtgtgagcctgtaaaggcctggccatattggcccaacttgggacaatgccaaaggtctatttacagctccccatagaagtgtcagtggcttgtcactgggcctacatcacagcttaacttttccctctgcccactcctgatttctattcttcccatccacaggtactggtctcaaaggcacaccttaataaatacctatgtactaggatctctctccaggtctgcttcttggagagcccaacttgtacacgtgctaaattgcttttcagtctacagatgtgtatggcatgctactcaataccaggctgtctgctatgccttgtttgttggtggtggaggtcagaagcacaaagatggataagatgcagcccatattcagaagtagctttagtggaggagccaggcacataaacaaataattatcttgtagggtgatggctcccttataggggtgattatatgggaatatatgggacaggttgaaaaaccacctgcaactcacagagaaggccttataaagaatgcgagatttgggaggggtctttaagaatatgatggtgtttaccacaaaaagtaggaggtgaagggcatttttaaaaggactaatatgcattacaaatataagagcttattaccaaccaaaaaaattctaggaccagatggattcacagccgaattctaccagaggtacaaggaggagctggtaccattccttctgaaactattccaatcaatagaaaaagagggaatcctccttaactcattttatgaggccagcattatcctgataccaaagcctggcagagacacaacaaaaaaaagggaattttagaccagtatcactgatgaacatcgaagcaaaaatcctcaataaaatactggcaaaccaaatccagcagcacatcgaaaagcttatccaccatgatcaagtgggcttcatccctgggatgcaaggctggttcaacatacacaaatcaataaacacaatccagcatataaatggaaccaacgacgaaaaccacgattatctcaatagatgcagaaaaggcctttgacaaaattcaacaacccttcgtgctaaaaactctcgataaattaggtattgatgggacgtatctcaaaataataagagctatttatgacaaacccacagccaatatcctactgaatgggcaaaaactggaagcattccctttgaaaactggcacaagacagggatgccccctctcaccactcctattcaacatagtgttgcaagttctggccagggcaatcaagcaggagaaggaaataaagggtattcagttaggaaaagaggaagtcaaattgtccctgtttgcagatggcatgactgtatatctagaaaaccccatcatctcagcccaaaatctccttaagctgataagcaacttcagcaaagtctcaggatacaaaatcaatgtgcaaaattcacaagcattcttatacaccaataacagacaaacagagagccaaatcatgagtgaactcccattcacaattgcttcaaagaaaaaaaaataactaggaatccaacttacaaggaacatgaaggacctcttcaaggagaactacaaaccactgctcaatgaaataaaagaggatacaaagaaatggaagaacattccatgatcatgggtaggaagaatcaatatcgtgaaaatggccatactgcctaaggtaatttatagattcaatgccatccccatcaagctaccaatgactttcttcacagaattggaaaaaactactttaaagttcatatggaaccaaaaaagagcccgcattgccaagtcaagcctaagccaaaagaacaaagctggaggcatcacgctacctgacttcaaactatactacaaggctacagtaaccaaaacagcatggtactggtaccaaaacagagatatagaccaatggaacagaacagagccctcagaaataatgccgcatatctacaactatctgatctttgacaaacctgacaaaaacaagaaatgaggaaaggattccctatttaataaatggtgctgggaaaactggctagctatatgtagaaagctgaaactggatcccttccttacaccttatacaaaaattaattcaagatggattaaagacttaaatgtcagacctaaaaccataaaaagcctagaagaaaacttaggcaataccattcaggacataggcatgggcaaggacttcatgtctaaaacaccaaaagcaatggcaacaaaagccaaaattgacaaatgggatctaattaaactaaagagcttctgcacagcaaaagaaactatcatcagagtgaacaggcaacctacaaaataggagaaaattttcacaacctactcatctgacaaagggctaatatccagaatctacaatgaactcagacaaatttacaagaaaaaaacaatcccatcaaaaagtgggcgaaggatatgaacagacacttctcaaaagaagacatttatgcagccaaaagacacatgtaaaaatgcttatcatcactggccatcagagaaatgcaaatcgaaaccatagtgagataccatctcataccagttagaatggcgatcattaaaaagtcaggaaacaacaggtgctggagaggatgtggagaaataggaacacttttacactgttggtgggactgtaaactagttcaaccattgtggaagtcagtgtggcgattcctcagggatctagtactagaaataccatttgacccagccatcccattactgggtatgtacccaaaggattataaaacatgctgctataaagacacatgcacacgtatatttattgttgcactattcacaatatcaaagacttggaaccaacccaaatgtccaacaatgatagactggattaagaaaatgtggcacatatacaccatggaatactatgcagccataaaaaatgatgagttcatgtcttttgtagggacatggatgaagctggaaaccatcattctcagcaaactatcataaggacaaaaaaccaaacaccgcatgttctcactcataggtgggaattgaacaatgagaacacatggacacaggaaggggaacatcacacactggggcctgttgtggggtggggggatgggggagggatagcattaggagatatacctaatgtcaaatgacgagttaatgggtgcagcacaccaacatggcacatgtatacatatgtaacaaacctgcacgttgtgtacatgtaccttaaaacttcaagtataataaaaatatatatatatatataagaacttaaaagaaaatgccatgactgaaatacacatgattttctggtcggacgggagatgaggcctagataggtgaattgaggccagatagtacatggcattatataagccttcaggaaaccatttatatttgtttggatcaaaatgaatgtcatataagaattttaggatttttgacagatcaattagtggccatgtaagaggtagattagttgggggagaaaccagaggtaaggaaaccactgaagaacctggtaggatattttgaaaatagaagatgaggtattgagctagagcaggaactgtgggtacaatgaggatgtgacagatttaggaaattttatgggagaattatcaaatctaggagtctcgcttatatgcatggcgaggaagaaggtggagtcaagatgactgagaattttgtaccaggaaatattgtcgtggtactctcaagagtcaggataggaattatgagagatttgagatatcaaagaccaagaagacaacttgaactagattcctaaaacacagaaatgtctctggactgcaaatataggtttataatgtaccaaagttcttgctctacatctcgttgatgttgttcaaagaaaggatatagaataaaaaaaaattgcaaagaaaagagcccctgggtaatatctgtgtctactgggacttgaataaattctgcttaatcctgagtagggagatgatgtctaaatattggtgtcctcacttcgcttcattagtatgcagagtgtaactccctcttttactattctaggaaactgtagactagctttatggctttatttatcttttgtgcattttctggccaaagcttgcccatttttatgctcctgaattcccttgttattatattaaaggaaatgtcccattagtgttctcaagtctaacaatttccaatatattcttatttctcctttaaaaagatgagatatcctaggccgggcttggtggctcatgtctgtaatcccagcactttgtgaggccgaggccggtggatcgcctgaggtcaggagttcgagaccagcctggccaacatagtgaaaccccatctctactaaaaatacaaaaaaattagccgagcatggtggcaggcgcctgtaatcccaactacttgggaggctgaggcaggagaaccgcttgaacccgggagggggaggttaccatgagctgagatcgtgccattgcactccagcctgggcaacaacagcaaaattccgtcacacacacacacacacacacacacacacacacacacacacacacacaaagatgagatattctaaactcagagtcataagatgactacttgtacaaaaagcaagaggaattttgcaagttcaaatccttaatctttgaatcaggagagttttctgcagcagaatcagactcagtcctgagcacttattctataaactttttgaaagcacaactttttggtgagcagtaaacaataacctatgttgagctgaatcaaatggaactgaaccaagcctataacaatgtcttcaataaggaatgtttgacaatcactactgactccaaatatgtggttttctataaagtttggttatatatatgtatgtttcagaaagtctaaaatggaaatattaatatatgtgtgattgtacttaagaataaaactcaaactcacttttatatgaagtggacagaaagtcagtgatgacagaagcagcaagacatactagacatgggatactgcttaggaaagtagcatttgcactgatgtccagaagtcggacagagcacttttttctcagagattaaagacaaactcacaaatcaggtatttatgcaaagccaaactcaactgtcagttgtgagtatcttctgtgtactaaaactgtggtttacttgtgtcattgttgtttgcattgattggcacacagacgataggtagttactttattcttctagcatcttccgtgacataagcaatataacccctatttccagataaaaaaaccaagactctttgagtttgattaatttaatcatgtaatccaaacctagactcaaaataaagtctatctgacctaaggccatgtatgctttccaacttgttcacactgttttcattaaatgccttgttaaaatgtgtggagagcttcaatgaggggaagtaaatacagtttccagatgtcttaattctctgagttggggcaagaaaatctgaagaatatctagacattgtctcaactatttcccattccagatcctgccatttctttgttgtgttttatagctataattaaaatgagctcaattagtttttggatttttcatgtcttgtccctttcctccgcttgggttctacataatcagtaaccctcaattaatatatgtaccgtttctaaaatgttatccttgccacttagtaacaataactaaactactaactctggcggattagctttttactgtgaccatcattatctcccaaacatatcttatggagacatttgttttcatgctttgttgtgtgatgcaccaacataactttacagacacagaaggactgactgatgacagttaaagaccaaagtgccttagtttgtctaaataatgactttggggttgtcatatgtatgtataagataaaacctaggacaaggtgatttgttgaggataagaaaaaaggaatgagggagattattgctgactttaaatagtgtggaatgatggagtcattctgcggatggatttgcactgatattttctattttatttagtttctggcctatgatctattgggttagtattagtacaatttatttaagtaaggtgaatgcctctctttgcatgttttccctacagaatctgacatatgagattctttctagcataaagttgagaaactaaagacgtttgggtatcagcagaattatagactgaatccagggacacttgtcatctgcagtggatgtaattcagtggttggcaacattagctgtttattggaatcttgtggacaccattggtgctcaatcttgcctataatgcaaattatttatggacctttaaaaattgctgatgcataagttccacccccagagattctacttttattggcctggagtgtggcctgggtgttggaatatttagccctctctgactcaccacccactctcaagaagtttctaatgtgtagctgagatagatgctaaatttgagggaaagtaattgaaacagggacaaaggaaaaaggctagattgggttgcaaaagtagccaaaaggaagtcaactgtaggtggtttacaatgatgagtattgaatagagaagagcatcttgaggaacagcgagttgccatcacataagaacaagataaggagcccagccaggatttgtggctggctatcttggggagcttcatggatgaggttaccatataaattctcatattttagaaataaaatggagtgctgtttataattacactgaaccaacaggtatacaccaggattctcttggacagactgcagtgcatggactttcttagcatgggtctcatttatgacttctgacacttacatcatttggcttgtgtaaacatgtcctttataagttaagaaaaatataataaatgtttttgaactctaataatatcattcccacagctccactagcttcgttagacagtgattctcaactttaatacaaatagctggtcctcattcccaagagattcagattttggtgagcagagtccagacattactctttctcttttaaagcttcctaaaagcactgcttaagagggaaggagttgttcaagctcaaagtgtttgcatccctttgtggagagttgcctgatgtcaaattgcaattttgtaaagattgattttggtgatttgtataatgaacgttattgccttatagccacaactcctaggtgtgttttgctccatttgctgctaagattatgtagccactatgtaatggtttaggcactcatagtatttaagttgccataaccttgggaagaatttgagagtgatcatttccaaatgtttcactggtgtgatgacattcaagggagaaaaatgtctaaaagtttttataaaagttttagaatgtcatgatacctaagatatctttcatgccaatttctaaaagggccactatggatgataagtaaaataaaagcatgtctccttgtgtttacagtaaatatcaaacactatctcattgtgaatataaccaacttttcttatccaagtttctatgtagatgatctgtgcttctctgttttcttatcttttatctggggctgcttgtcttttgagtagtagttaaattatagttcattagaatagagaacaaaatacaaaaggagaaaaccaactcaactattttcattaatggatctgttgatagggttgaatggcaggaaagtatgaagctggaattgaaatgatgcttttgcattacctgttcaatgcaatggattcaaccttttttcactccttatgttctcagaggacaaatcatggtcaaagctttaattctcttggctttaagactttgagagaagtttgaagatataattgtgtaaattaacttgcaaacatggatcattgatatttttaaattaataaaaaatctctaaagaaatatatatatggttattctaaaaaattgaattgtcaagaagacttatttgcataatttagagaacttattctcttcccagcacctgtgtggtaatatttatatgggctacatctggtgtgaagtttttactctttcttttatttttttaagcacctaacacctgctggaaattgctatgttgttaggagaaatgaggattgtattggatttttcagtggattctacaacgtaattagtctaggagtatacctggttgagcagcagaaaggatgggaggtagagaggcatgaagggccgtaacagggtttccctctgctgttccacagaatatttctttcattgaccctttcttagaaagtgggcactagaaagaacatcccatcctggagccaaccagcaccaattatctataactgtagaatgtcatatctgaggccttagagaatttccagaacccagatcttttctctaaaatgaaaataaggctcagggagactgagaaatatccccccaaagtcaagctaatcaattttagtagttcccagttcattgctcactttactgcatcctactgtttagccaaacatttaccaaccctagggctccactgacttgttctgggaactttaaaaataaggaagcatttcctgccaaacagtgaatgatgaaactgctgcaggaacccactcttcacgtttacctaatttatattgcagggttctatttaagatttttagagtgaagaaagcacccacaatcagttttgatgctaaaaatatatgatacgcattggcctaaagggtaatttccttgaatacacttttaaaacactagaatcttgcactagtattagcacagagtatctttcaataaggtgttgtttaaagaatgagaaggatagaagaacatgatttctaatctttctctcattgcacaatccttgaagcaaagatttgacacatgctccaaggtggtatgtatatatgatgtaagtcagggatgctaatgtatatacttgaagcattatgtcttataaacagaaataattaataaaaatatatcctcttattccactgaatgaatgaaatcatatatcatcatggggaagagcacaagctcaacaacctgatggttgtcaaatgccagctttgctatttattagctctgtgacattgggtaagttttctgtgcttaattttgttcatctgtataatagggacaacagcaattacctcacgggaggatcaaatgctttaaggcataaagctttagaatagtgcctgctatgtagtgtaagcattcaataaatattaataatttttattgttagccaggaaggatcatgcttggaaagtccttttgtggacaatgtttctaaggttccatcatttctcagtaggttttacctatttaccatgtttcccatccacatgtgtgttctattctcttccaggaccttagcgcagaaactggatgtgaacatcccatcttctagacaacagcaaatattcattatattctgtacaactacagagtgttagaatgtatgatatatttgatttcctggctcattcacagtgacgcctttttttaaaacatctgaactttgacggagtgagtatgtgatccctatgaaagagatgactagccagattacaggtatgatgactcatacatgtaatcctagcactttgggaggctgaggcaggaggaatgcctgaggccaggagttcaagagatgactatgtagaaaccatgtaagacatggtttatgtttttataaacataaaccataaacataaaacacgtttatgtttttctaggttctacacatattgggtacaccaaagatgtttggtaacttgaatagacttaatagacagaagtttgatattggtgattttccttttatttgtatcagattgtattatcagaagttcctggcctgtgttttgaggccagatatttagaaaatactgagaatcttggaaaataggataaccagtctgagcaaaatacctgttggcttaaatctcaaatatatttctgatttcagtggttattcagtcagaggagaactcagaaaggcaggcatatgagaccaagtgcagaaataaacttacaataaattttattttatattaactcaatatttgtttattagaaagaatcaggcttggctgcagagataatgatgataaatacagccagatatatgatgacggatttagctgagcaatgtctggaagaggtctttataagcagagacccaaacaaattcttcaaaattaaatgactgtattttcatcacacacacacatacacacacaccctcacaaggcacggttaggagaacaaataactacttcgatcaaaacagaaactccagagcccaggctttacctaactgtgcaaggaatgagtgtgagacagacaatggaactgatgtgttctaaaccaattcaagaaggtagagctgccagaagaaaaagattcttttaagcaaaatctgaagccaccttcatgaaacatagagactactttatactactttacaattagagtgctgtgaaagatggaacaattattggcaagtcaagagctgaaaatatctgcttgtgtgtagaagctgtagatgggcacccttaagcttttgttccctctctgtcaactcattgaatccaaccttagtgggcacaattccattgctactgcagtgataagagattagtgccagaaccaagtttcaatgccttaacatatgctagccaatgcccaagtgggagatctaagactttgtccaatcacagagcaatgagtaccatggggcccaaaggagagagacctaacaagtgaaaatgaatcagttgatatcaggcacccatcctattttcttgaacgttgagaactcagacccagaaagaggcttatgtgaaatacactgacctaaaacaaaagctattatactttctcttgaatctggcttttcactggattcttgttaaaagaagttacagaaataccgtatcttggttgtaggcttgtgcaggcccatggagaaaggtttgataggcaaacatttgtttattatgctatagatgcatataatttaaataattggattatgtgaaatggtactgttcaaataatcttctccaattttctagggaccctcaaaagaaaaagaaggaaaggaagtggaaatgaaaggagggagagaaggaggaggaggaggagggtggggagtaatgaaagaggagagggaataaaggaagaacggaggaaaagaataaagatggagggagagaaaataaaagaatcacagacacacaccctctgcctaaagatgttgaataattttttattttggtaatagaatggataatgtagatgccttacatggatgacagtgaaaatgttggttgtttatcctgaaatagaatttttcctctttgggattttgggaaccatttttaaccaattttttaaaaaattgaagtaaatatgcatataaaaattttgtccaggagcacaaactgattcagtttgatgttcaatgcatagtcatttgacatgtatatacacttaggtaaaaatcacccaaaacaatatatagaatagtttcatcacccaagtaaatcttttcatgcccttttccccttacaagctcttcttcctcaagaagatgaccactactcagatttctatccccatagattagttttgcatgttcttgaagttcatgtaaatgtactcttttttgtttggccactctctctctcaacattatgttttagagatttatctgtgttgttttaaatatccatagtgtggcccaagtagtattctattatttggatatactaaaatatgttttattcattctccctttatggacatttgtgctattatcggtttttagctattgtgaataaggctgagatgaagattcttatacaggtttttaaatgagcaaatatttttgtttcttttgggaaaatacataaaaatgaaatttctaggtcatatagtaaatgcatatttaactttataagaaactccagtcttttaaagtggttatactatttgacactccctgcaaaagtgaacgagatttccagttgctctacatgcatgccagcatttgatattgtcagtgtttttcattttagccattttagtgggcatgaaatattactgtggtttaaatcatattccttgatgactaaataatgttgggtatctttttatgtacttatcggttactatacatcttcttttatgaagcatctgttcacatcttcaaccataagtttaaaaattgggttgtttgtatttttattgatttgtagttcttcctatgctatgaatatttgttttgcaaatattgattcaatggcctgccttttcattttctaatagtgcctttaagagaaaaaaagtttggttaaactttgattaatccaatatattatttttttcttttatgtttattgcatgttgtatcttacccaagaaataattgtctttcccaaagccacagaaatattctcttgtgttttctccttgacattttatagttctagcttttctttcagcctataatccatctcaaattaattttgtttataggataagatttgagagtatacacacacacacacaagtatcgagttgtttcggtgccacttgttaaaatatttttacgcttttttccatattgaattgctttagtgcctttgttgaaaaatagtcaatgtacagtgtttgtatagattcatttctaaactccatccttttccatttatctatttgtctatccttatatcagtatcacactttttgattactatattttcataatttatgaattcacataatctgagctctccaatattcttatttttcaaattgctttggctcttacagatcacatgactttttatagaaatgttaggataaactggtcaattcttcagaaaattctgctggtattttaattgggattgctctgaatctatcaacgtggggaaaattgacatcttaacatgttacatttttatttaaaatatttaaaaaatttctcttaacagttacttatagttttcaccatatagtttgtacatgctttgctaagattatccctaggtattttatttatttttattttaaattattatatttttgtattattattaaaaacaaaaatacaattgatttttgtatattgaaatggtatcctgtgactttgctaatttatttattagttttatttgttttagattctatgggactttctgagtacaaaataatattgcatgtaagtaatgacacatcactcctgatctaattttttttttgtctgttgcactggctgaaacatgcagtacactattgaaaagatggagtgatagtagaaatctttaccttgttcctgatcttcagaacagatgtttattgtttcaccataaaatatggtgtcagctccaggtttgtcatagatgtgctttatgacactcaggaagttttattttccaatattctgagaggttttaacatgactaggttttaaaatgttatcaaataacttttctgcaactcttgtggtgacagtatgcttttctcccttattctttagtgtgatgaattctattgattcattttcaaatattaaaccaactctgtgtttctgagatgaaacccacttacctataatgtattatccttcttgtatattgatgggtttttttacattgcttacatgtgctaatattgcagtgacacacaaccatcatatttttctactagatttatttcctggtaggaaatctatttctgatctctaaaagggcctattaatatatcatacccttaatactctgtaagtacatagaaaatattttaagaataaaacgtatgagtgaacaaattaatgtatatgcatttgttctcccatgtctctttcaaaagtaggttttgcttaataaaaagttcaggcttgaccttgcataagtcagagtgcctacagcttcccatggtgtggactggtgtcaatgtggctccattttcacccatgaatggaggggtcattcataagactgtgcggttatcaggaaagggctggaatcctagtttaggatcttttgctgccaggaaatccacttctgcccatgtctctgtttcttcatctataaagtaacaaggctatatgttctaaaagaccccttttatgtataaaattctatatatctgcaggtggtaactgaattgagggaaagccaggaatagaaaccaggtctcttcaagccaagatagctatttcctccactggattgctctgccttcctctttctaatactgactgtttaatgctggttatttggaggcttattaaaattgttcagcacaaggaaaacctgttctccatcgctatcatcaccaacttctttgaagtgactctataaaatttgttacaccggtctgtataaatgtgagcatggaagtcaaacccttctttactgacatgttaatctccccttggaacctttctgtgtgtatgattcatttggagggtaatggtcctatctatgttttatagttgtctaatcctgatttttttcagcttgttatatttcctgtgcccaactgttacacagctggtgctaagctcatagaatattcttcaaatcagcctttggattttctcactgagttttgttaaggagagattaaaaatattaatttttaattgaatgagtaatatccaaatatagtctcatttttaaaccttcaaacattatagataatgtctaggtccttataaatcactcactttctttcctagtcagctcccaagaggtaatccatttggtgaattttcttatgtatttacatacatacatgtacctaatggaatctaaaatatcatataaatgctatgatgcaatgcacattttttcagtacattccctcattgtgttgttttagttcatcaatataatagatggttctgcagtgaaggttcttatgttgtcttgtacacaagtgcgggagaagtgggaggaggtagaattgctgcatcatggagcatgtacatatttaattttaatgggtattatcccagcaaaatggttaagagcatagctctgaaatcatattacccaggtttgaattcccactctgttacttactagatgtatgatttggatctggttaaccactctacaaaatggggataaaatctcgtaggattattatgggggttaaatgaaatgatatgtgcaaaacactgaaaatactacccagcatatcctccactatcagttcactgaagccaagcaccatgccttacagatgttgtgtccctaataaagtgctgtacttggcacataataggatgtcagtaaattcttattgaacaatcttagttacatacctaaatggctattcttccacatagctgtaatagctccttgcataagatgagaagtggagtcacacttgaaaagaagcatttattgagatcttctactggcatacatcaggcaccatgctgggtgttctacattccctacttaatttaactgccctacgatcaaataattggggctcagagaagttaagtaacttgtccgaggccacacagctagtaaatttgaattcaaactcagtgttgtctgctttcttatacactccgaggacagacagcagaatgccttcatttcctatagacatcatccccataggagaaggtacactttttctggagatgtcataaccctacatcaaaaacccttagagagcattttttagaaagagaaggcactattttaaaaatctagttaacattaagttgagaaaaattctggatattggcaaaaaaaatttaaaaatgttttaaaattcagagaaatggaaatgatggattgtgtcaattgttgcagccaaaataatactccaatattaaggggataacagtcatgaatactgcaaattttatacacaatagaatatagcatctatactcacaatgaagaatagagttacagcacagaccaagaatatgatactcctagctttttatgcctgggtttagtactgtgtcaatttgccattgctacaatgatgttgtggaacaaagaaccacagaaactctgtggcacaggaataggactttatttagctcagacatctgtggttggctgacagccagttgatttaggctgggctccttcacattctgtttggttggggcagctctgttccatgaatttttcattttcttcttgggaccaaagggctagccaggctatattctactcatggtaatggcaaaagtcccggagagcaagaataatcaaacaaggactcttaaggcttgggctcagaattgacataccttctgatatcgtttggatttgtgtccccgcccaaatcttatgtccagttgtaatacccaatgctagaagaggggcttggtgggaggtaattggatcatgggtgtggattttcccctcgctggtcttgtaatatagagtgagttcccattagatctgcttgttcgaaagtatgtagcatcacccccttctctctattcttcccgtctggccatgtaaaacattcctgtttccctccccttccatcacgattgaacgtttcctgaggcctctccagccatgcttactgtaaagcctgaagaactgtgagccaattaaatctcttttatttataaattacccagtttcaggtatttctttatagcagtgcaagaaaggactaatacacaatcccttctgctatattctatggacaaaggaagtgacatggacaaggccaaagtcaagatgtggggaaatatgctctgtacttgtactgagaggatcttcaggatcacttagcaaagggtataattcagaaagggtgaaaaactaaaaccaatgatgaaatcgaccattaggattgtaatcaaagggttccctgaggaaatgtattttctgtaccaactttggttgggcaggtaaaacagaaagaggaggtggatgatatctctgtgttttttttttttttttttttttttttgtaatcactactgtcattccaccagtgaggctgtgatgaaaaaaaaacgccttcttcaatcctcccttccctatgggcacatggagtgaagagtaatttaaaatgagcagactgcttgtagatttttcagaacacctgcatcttattttagaagcaattgacgctcttggcctggtttgtgcttgggcaatttggagtgattaaagaattttgcatttctcaagtgctcctgtgttcagatgaaccaaattggggttgagcgcaaatctgcaggttttttttttttttttggatgcacatttaattactaatcacctaagaaaatgtccaggatatgaagtttccaatgccccacttagaattcacagcagaataaatttagaagcctccctggcaaactccaactcattggcttggtacttttcttcctttcctttcttatatttaacaacaagtagtcctcccctctttgttttgtcatttttgctcacatgttgcaggcttgaaggaagtcagcttcagaggaatgctctttaaaggaaaattttaattctggtgtggggactagtgtgatgagataaagtagggagaaaagatgagtggggaatgaatgggattagagacagccaagagatattgaaacaaagaggatgttttagaatgtattaatacatttttcccttttttatttgcttgtgacctccacattcaactagaggaaggctttgcctccaggaaggaagccataaagcaatagcagaaagtgaatgtgtagcttttgattgtcttgaaggctaaaaggatttcctgaattgcagaagctccccttacgtaagactcaaacttatctggcaataatcatataattttattctaaactctggtatagagaaggcccagactatgagcacaagaggggtactatctgacaaaaagtggacatacaagtcttctgcagaatgaagaagaagagtgtttaggagataagtctatggtgccacaggggaccccagctgtgcagagccacagttgcactgaggtcagagacctactacctaaatcctgggtgaagtgaactactttcaccctcgagttcagaagggactacaagaggaacaacacaggaccaggcagccctccactgcttctaggagcattcaagcttcctcatcctcccagacatgaccatagaaaagtgggaggggtggggagaccccttaagaaaaaagagaaacagccttgacaaggaatttgatgcttgagttgacagagcactaacctaaaggagtgtaaagaactagaaagcgtattttaatgcaaagagtgttacgttttattggtatatcccctgtaggatttgaatggacctatattttggcatttttaatacctaattagcagcaaccctgaattccactacctatcgacccccattctctttccagttctgcctcaagttggaaaatgatcagatttactctctgagcagacagggccaataatacattcatttatgcttaatcatatatgcccaggatagcaggaagataaattattcagaacattagtttccagaactagttacactagctaagactaaagatattaaaataaagggaattcccttctttactggaggagagacagagaggtaaagggcatatgtataaaacatgtcagacaaagctgatacttagtgggcatagtggtgatgagcaaagccaagcacatatgagcaagtggacccaggtctagccatggagggagatgagacagaaaccttaggagaccagaatctgctagaggaatggcaggaacacacacctgtgaggagccagccatgagatgacattacacttgagagagaccattaggccaagttagttagaatctgaggggagatggggcagatgctataatcatcatccttcatgctcttcctgcgatatgactttgacttccctcccttcaagctgtgggctgtaggtgggcttgtgatactatgtgacttcagaagcaaagatcatggaaggaaatagagcttctgcttaattttccgggagtgtccacctttggaattagcagctgtcatgctgcaaggaagccctagcagccacatgtaggttcagcttatggaactgaatgtaaaatctcgatgctcagcctgccatctgaaacagtttaccagtgtaaaagacatagggaaatactttcttgtttctctactcaggtctgaaccagaaaactgaacagtcatctccttactgtgtgggtaggagttcacaaagcagccagtttattctatttttgccatgttttctgtaaatatttctaataaattctgtctgattcattacctttatccacttcctgagcagttcaaacccttagcaccactcttactacatctattttgagacagtttttccctatcaacagccaaagaatggggataaagggaagctggctgtgctggggaaactggaatgatgtaatgggtttttacaggtaaagttctgacaataaagcacagtgagtgagggggaaagaatccaggtagttggacatgcagggaatttctgttaattcattccctcaagagtgttggaaatatatgcagtaaggagagaagaagataccagcgattccagaggatctgtactaaacgaacacctcttggatcctggaaatcgtactagatgttcttgatgaatatgtacttactaagtgccaagaacttctaagtgatttacatgtattaactcattacaataactccatgagctaactactatatttttacatataggaaattttacatataggagataggcacagaaatgttaagtgccttgcccaaaattgctcagcttgtaaaaatttgaatttaggcagtctggcttcacaccttgtgctattgacctctatgctatcaggctttaaatgcttaatttaattatagttaactttgcagaattgagaataaaagcaaggatgcaaactggcaatgtttaccccatttcagtaagaaatggaaactcaatcctcaattcaccgtgattagttttctgtcacaatacaaagcatgtaaatatccagaatttttttcctctagtgtccaatctctgccacattaaatactagacgatagcggaacaacctctacataaacttcaggccagaaagattaggtaccaataattttatgccctcatcgagttgcttttattgattttttattgatttattcaatcaatcaatcaacatgtttattaagtgcttattgtgttaaaggcaatgagtggaagtagctgaaaaatacccttagacatatttgaactgccttgggccacattctatctcttgactgtcgtgggttctcaaaggtatggcatgtttctcataatgaagttaagtagattaagggatttctgttacagttaacttttagccttcagaagatttgactatgattaaatgggtgagcagtataaattctggaaggcagaactgcatagtaaagaataaaaactctggtatcagagacaactgggtttgagtcctcggtttgctatttggatgtaacctcaggtaaaacatttatcttttttaagcaccgatttcctgttgtgaagaaggttgtaaatagtgttgttgtgaagattaagtgagataatatatttgaatggtagagtatgatagctggcacagaattactattcaatataagttgatgatggtgggtggttatgatgatgcaacagccacatatagtcagaggtcagtattttaaatcatttttctaaggcttttaagcaggtcttaaatccagtgaatacacataaatggaatcaaaactttgagtctatttttcactttgttaggtgatttcacaagtcatcgttttctctcccctgattttgaaatatagtttgaagtaactagtgagggaagcaatggttattaaataacaaaggtataaactggaagtagcagatgagataaagctcatagctcatagtaattgcactttttgaagagtattatcttgcgtagtgtacataatatgcttacgtgtcatgtaggagccatgaagttttgaagaacttcaaaagagaaagaaggttgaggctaaggaagatgcaatgtggctatgtatataggttctacaatttaaaaattaaaaatggaatgggagagaaaatgataataacaccttaactgatggctgttgtgactattttatgagctaatatcttttaaaactatttggcatagagtaactagtaatatgttaataattattacaataacaatttagcttcaaggagctcacagtctggtgaacacactggacttgaaagaagtgaggaaaacattgcatataagaacatacagagatgggctgggcgtggtgactgagcattttgggaggccgaggcaggcagatcatctgaggtcaggagttcgaggccagtttgtccaacatggtgaaacctcgtctctactgaaaaatacaaacattagccaggtgtggtggcaggcgcctgtagtcccagctactcaggaggctgaggcaggagaattgcttgaacctgggaggcagaggttgcagtgagctgagattgtgccactgcactccagctccagcctgggtgacggagcgagactccatctcggaaaaaaaaaaaaaaaaagaacatacagagattcttgggctaattcataaagagtgcttttacctgtctgaggaactaagcaaaatgtcataatgaccttagagagtgagcagacatttgtgtatgctgtaactgcaacacagactggggctaaagaggggacgaggatgaggtgtgtgcagagtagtaaccagagataaggaaatggagggacaaacttctttctaattttccctctccatctttctgttgttttttgctgctcaccttccccatgcttcccacatcttctagcagctctatccaagggacatttggttgtgtgtgttaaggccatatttagaccaagtcagggagaagaaatccatgctctttgtaaaggtttcatggcaatacatcccctcaatctcctccctcaatataaggctaaggaaaccagaacagaggggcacattttgacccaccgataaaggggacaaggcccctagagtgtgccagactcacacttccagtgcttgatatatggagtatcatttcatcctcataggaaccctgcaagggagatctccttgttcccacttagcacaaaataaaactgacgctcagggagatttttaaaaagctggaactaggacaatttcaaacaacaatctagaaataaggtactacctgttcaaacagcctgctgaatatttggggagaaaataactccttttcaccgtggacactgtcaacacacgttacttcatcttttaaaaatgtatctaaaatgtgttgaattgcttaataaatactcacactttcaatgtaaacgctcttcttttctatgtgctccatatcgctttgccctctttatttgagcaacgtaccctgtagtgtgtaaataagagatgacagctcctataatacgtgtgggtgaggaatgggttcgataaaacagaagcatgcacaattcaaatagcaagccctgtcccactcagtttatgcacaaataacttgcagattctctgattttctgccagcaactgcctcctcttcccctccccactgccttccagaagtctctcagaatcatatccggcacggtgtatagagataggagtaatagggataagacttgttttttctgaattttaattattgtcatttagcatttgctcagtgttttgtgatgaaaatcgttgggttttacttatttttactatgggcaaattgagatgcctttaatcataaaggcagccccaacccaaggtacccttgcataatagcggaaggggtgagattaggagtaagcctttagagcaccggtgcaggactcaggatatggatttgtggcttgttcttatatgccgtatttgtcttatgggtaaatgctgtatatcgttttgatttttcctatcgtggaacacttttcagttatatgtctggtggaatcaagtgtttcatgttacttttaaatgtacataggtggcttaattttttttatttacaattcagcacttcagatgtgaagagatatggctttttctttttttttttttttttttacaacagaatataacttgcttctgagccctcatttctgattggtggtgatggaaaacttagcttgcctgttggaggtaactgtcacttccaattcactgcagtcttgtccaggttaacacaatcatgttggtgtaaatagtcaactgaggatttaaatagtcaattcaaaatgcaaacttcttatctaagtgattctcccctctcaaggaatttccccttcctgtcctctttccagtatgttatctgggttcagagtgggtacttgtataactacacaacacagaggaagagagtccagttctcatgcagtcatctggatccctgctggccacctctgaagtagatgtctatatccactgtgctaagtggtcttggaaatggatccagttggtcattagtggagctctagaacctgctgatgattcatggtccctgccaacttcctctctatgccctcctcattcaaagtgaaggtttctttcagcttattggccctttggcccattcccattctttgtagaaacttctgcagaccacattcagccactggaaaaccaaaatatgctttctcatctctctcctctccttcacgatgccattctgccatttctgttttgtggtagacaggttggcccaggcactctaaggcccaggctggcacaggttggcccaggcacttcaagcctaagtccatttacagtttctattccatctattcctaaagaaggaggcagagggcaggtctcaactcgtgtttcagcactgctgttttacacacacgcacacaccctctctccaggcatctctaactcaggcagaacttttatttcctcccaatatggcagaaaccaccttcaatttcatatcaggatatttccttctttattgtttatagtttactttgcaactgaggtgatctccaaagaggctgatagatgaggactaattgctaactgcactcccagctgcaacaggcatgaaggaagatatgggtggtccatctccatgttcattacagtgataggtcagctgtctccaacctttttggcatcagggactagttttgtggaagacaatttttccatggacatggggtggggaaggaaggagatgattttgggttgaaactgttccacttcagactcagatcatcaggcgttagattatcataaggaccacgtaacctagatccctcacatgtgcagttcacagttaatgctcctatgagaatctaatgccgccactgatttgacaggaggcagagctaaatgcttacttgccctctgctcacctcctgctctgcagcctggttcctaacaggccacagactggtactggtccatggtccaggggttggggacccctgtgtgatgatttctatgcatgcttagtgatgtaattttgcttttctaaataccctgtgttcacatctaaattctctgtgctcttttcctatttagaaatctatttgcctcatgacagtgaaaggggaggcagtttatacttctttggaagggaataaccacttccttatgggactttaaaccaaacattgattccctatccttttttctgccaacaagaggttgaaacatgaagacctgatacttcctatgtaactcctctcttcctgaagtggcttgatggttctgtctaaccatttgagcttagtatggtgatagactacacttatttgaagaacgaaaacaacatttctctcccttaagaagtggtgatgaatgggggaagaacagagttctgttctcttcccacagagaaatgtgtgggtgcaggcaggagggagagagcagaaagagaaggaaaggttaaaaggaagtcacaccactccttgagaagtttcctcaagaagatgacacagcaggtggccccacatcaagataaatggtcacacctgagactcccctgagttggtgtgaatgcctgtttatataactattaccagaaaaccactccaagtgcattttctaccaagattgggccattaacaagccagaattcgtattctagaagcctatatggggatatggggacatacaactggcatggcacaaaaagctagttaataagcaccataaaggactcctcaaagggctgccaagaactcagggtggtgtctgaatgtgttcaagagccacatcatctcatctgaagttagcaactgcagcactaacacaaatatttgtcttgctgctttgacagtcctttgattagaattctagagttaactagctagatataccacacactcagctgagcagaaatttaaatcaaactgtagaattaaaatcctgttgataaatattttggctgactgtttcctactgaggctggcatttagccaacatatttgttaactgagctgtgatttgttcttttggattccaattcactagttctgtgtcactctttggctgctgacagggctcactgcagaggaaattcaaataaaaactaataatgatccaaatgactaatggaataaaattggaaactaattgagaaaattatagaggagaaaatcagctgaacttggagtagaagatataaggctgactatgctaactccttcattaaaatgtttctactcaccctgacagatgtggcttttccctttactaacctaacccctcatggcactcaccaagttctccctcatgctacatgaatgtatgtatgtatattcatgattgtttcctcctgattggacattaaagtccatgaagttaagtgcacttcatccatctgacattgcctcgtatagggcctcatacatgatagataattgaactgcaaaagaatagagctataatgaaactttgcaatggcataacgtaacccctcctttaacaggtgatagaattgagaactagaatattttaacaatctgcctggggttacctggtagtggcaacacaataactaggtgccagttctcttcactttcaagccaatagtctttttttctttttataacattattacatgctcacatgttacacatacatatgctgtgacaaacccatgtgtgacaaaaatataaagtacaaaataaatgtatactataaacccaccactcagaataatcactatcaatattgtactatatatgtataaatgaatatatgtgcataaaataaacaggttaatatattgatatataaaattaaaatgcatatgcaaatatgtaatctcactatgttaataaatataaatgtttatcaacactattaactaaatatataaatcagcataaattaagtaaatataaatatattttaatataatgtatgatatatattttgtaccttgattttaaaattaattttacattatattataagcattttcccatggtgttatattgtctccatcaatattatctttatagattaccttgaaaagtccattgtgtggacataacacgatttttttgacttattctctataatgtaggttttttaattattcaaaatgttcaccattttaatgcaagtattttctttcaaaaaatctttcatcattaaaatgcaaagatatggagggcagcattgcacacaattcttgtcctcacctcagatttttttttacaaaggtgatttctaaaaccagataatgaactatttaaggcttttgatacatattacaagattgttttctaaaaagcttacaccaatctgtactccattattatctgactcttttgaataaggtgttatatcaaaattgctttattttaaaaggctttttttattagctgaaaactaagaatatattttatttggtctaagaaaacttataactcagaaattttatattttaagtcattgtaaatcacatatatttactaaatacattcacatatgtgcatatatatatatacacacatattcatgtatacgaatatacatatagtaactagaatttactgaaggtattgaaatacttttaaaatgatgtcctatcacctgagcttattgttttaaaaataaaaacaagtacttttatagtataaaagtactttaataccttctgtattaaagttctatgagattcttatataggtttttctctctgtcagattttcttttggtaaaagcctttaaggaatactttaatgttcatcaacattattattattttaatctgaaattttaatgttatttcctttactattgattttcaggatttgtagggtttatttttaaatatattgtatcacccacggaaataaactagttaagtgctttgcatacctgtgtatttcttactggtctctgtggggtaaatttgtcagcaataacagctgaattttctctgttctctgttgcattatcttgggtgctctaataagactagtgcttctaagcactgactaacagaactatatcataatcttgttctttgtattttttctaatatatattgaatatgaagcctttaaaatatccatttgcatagaaagagtcaacatgaatgtcttataattttgtcaaatgtattagtaaaacaaattttaaggtcattagttttcaaaatcattttttgacatttttattttgaaataattttagacttaacatagaagctgcaaaaattgtacagagactaggaaaagcacatctattgagacagaaagttgcctaaagctgaggatgggaacaaaggtgactgcaaatgattctaaggtttcttctgagggtgatgaaaatactctaaaaatggtggtaatggttttgcaactctgtaaacttactaaaaactgttcaattatacacttgaaatgagtgaatttaatattatgtatatgatacttcaataatgctcttaaaaatatattacagaaagttcccctgtaccctttatcctgtttcccccaagagaacatcatatataaataaccttagtacaattatcaagactgaatttgaatttggtacaataatattacctaaatgacagatattatttggatttcaccagtttttccatgtactttctctcttcatcttcttttcatttttggtggagggtagtatatagttctatcaattttattacatgtattacatgtgtagatttgtacaaccatcaccactatcaggatatagatctattctatcactcaccccccaaaaaaaatctccctgtgttatccctttatagtcacttatttccccatccacaactttggcatcactaatccgttctccatcactgtaattttgtcatttgagaatcttatataaagtgaaatcacacactgtgtaactatttgggattggctttttcacctcagaataatgtcttcagagccatcctttttgggtatcaatagtttgtccctttttattgctgtgtaatatctcatgatatagacatccaacaatttattcaactggtacaggacatttgtactgtttccagtttgaggtgatgaacatttatgtacaggtttttatgtaaatgtacattttcatttttctagtgtaaacactcaggaatggggttgctcagtcatatttgtcagtttataagaaactatcacactgcttcccaaactggtggtaccattttacattcccaccaacagtacatgagagatcaagttgttctgctatctcatcagcagtaggtattgccaatattgccattattttagcaatgctaatagatgtgtagtagtatctcattgtggctttaatttgcatattcctaatatctagtgatattgaacatcttttcatatgcctatttgccatctgtgtatctttggtgaagtgtatttttaagtattttacccgctttttaaattggatggcttgttttcttactgttgagtttagagaattctttatatattctggttatacaagtcttttgttggacatatgacttgcaaatattttttcccaatctgtagcttgagttttcattctcataacagtgcctttagcaaaacacaaatttttcattttgataaactctaatttaccaactttctgttatggttcatgcttttgatttcatgtctaagaactctttgcctaatccttggtcatgcagagacagatattcttccttttcaaactatatttcttttgcttgcctggttgcactgtgctatcttgaaaagaagtggtgagagtagacatgcttgccttgttcctgatctttgggagaaagaattcagtctgacaccattaaatataatgttagctgtaggttattttgtagattctctttatcatgctgaggaagttcccttctgtttctactttgctgagagtttttagcacaaatgggtgttaaattttatcaaaggcttttctgctttaattaatataatcgtacactttttttcttttagactgtaaatatgggagattgcattaactaatttttgagtattgaaccagctttgcatcctagaatgaaccccacttggtcagggtataggtgtcttatcccttttatgtatttacattttgttgagaatttttggatctatgatcataagggcatggttcaactctcagtttcattttttaaagcctttaaaaatgctattctgatctgcgccacttgtgcactgctacccagaggccaacctgaaaccagtgtgatatttcatgccataattcattcagttctcaaagtttttgctgtgttgattgtggtcagtttcctgcataggtcacttcagggtaagcctaggacttcatacaaagattgaaaagattcctttcctacctctctcttcttagtaatcctctccaactgtgggaatgggggaaggtagagagatgctgcctttgcttacctttgcttagtgagggactggggtagttctacagagctccactctactctatctgcagcagccatgcttggggaggaggagagtcaccacctcttcattgacatgtgccacctcaggaaggggtaggttaatagggctccattgcacagaccctttggaaagtacacttattggggagaggcaaaaaaggggcatccctacctatatgtcacagataggctggtggggagtgagaagggaactgcgtccttggtggtattattagggcaggtagggtaaaaggcttctgtcttacaaagcctccttcttgtcagtcctctgaatggaggaaacaggtttttcctgggactttttttttttgagatggagtctttctctgttgcccaggctggagtgcagtggcacgaacttggctcactgcaatctctacttcctaggttcaagcgattctcctgcctcagcctccagagtagctgagaatacaggcacgccccaccatgcccagctaatttttgtatttttagtagagatggtatttcaccacgttggccagaatggtctcaaactcctgacctcagctgatctgcccaccttggccttccaaagtgctgggattacaggcttgagcctccgcacctggcccctgggcctttttattctgtacccttttgtggtctgagttgctggcttctctagcacacaaaccaagatatagatgagacaaaaatatatagggaactcacagtcaaggcttccttcatcactagcccaaccatctttttgaatccatctttcaaaatcttctggataagtgctttaagtgtatccagggtgtttgttgaaattagcagaagtagggtggaatgtgcttattccatcctgactggaacttgaagctatcattctatttttattactagtgagatagaatttgttttctatgtttgtcattaatttttatttcctgtcttaattacttactcatgtcctttggccaatttcaaatgagacctagatgttgttcttattatttaataccaaaactttatatatttactttatacactacctgtttacagtaactgtattttctgtcaagtaatttctccaggttttctttttgttttcattattttgcataaatctatagtttttttctactgtgatttcttctttttacctcctaagatcagataagcaatcagttaagactttagttttatgtatttgttttacctttaaatcataatctatcttgaattgatttttatttttttgtgaaaagttgtggtaacttgatttttttttctctccaaatagttattgattgtcctggaactcttgtttacttagtgattctttactaacacatataattactgaatgaatacgctttttcttcaaagaagaatttcttcaccacccacagctttaagcctaacaaatcatctattgaaatttaaataagaaaataaagtctaacttctcttataaaaggtgacatagaatctccttgtgttcactcttctacccctccctcaccaatccacatctaaaggaataaacaagtgtatgagccaaacaaaagaaataagaaacacaaattaaaaggagataattaagtctggctgttccataatactaataaaggaagaaaattcaggaagataaaggttattataaaatctaaaaagggaatttaaaccacaagctttcactgtagtctgcattttcctccctggcttttgtgtttaaaaaaatgagaaacatataaatatttattgccatcttttcaaaatataaaattaaaattggtgttccataaataagtgattgtatctttctcagtttgcagatatttcatgctttcctgcttaattttttgaattattcaaataattttaactaaccactttaatagctatataaatataaagacatatcttcaccctcaattgctctggcttttgtacagaagggggaaatatgccccaaatgtcaatttcctcttgcagcactatatgtggctcgcacagtggaagacggaagcaccatgaaatgtgggatacacaagataactgaaaatgtgagatgttcttgatgagttggtggtgacctttgcaaatttctccagttttgaggaattgtccttgagcaagtcagtccaagcagattttattttattattttgagacaaggtttcgctccatcacccagagttgagtgcagtggcacagtcatggctcactgtagccttgacctcctgggctcaggtgattctcctgcctcagccccctgaccagtagctggaactacaggcacatgccaccacacccaagctaatttttgtattttttagtagaggtggagtttcactgtgctgccaaggcttgtctcaaactcctgggctcaagtgatccgcctgcctgggcttcccaaagttctgggattacaggcatggatcactcctcccagccccaagcagattttatatcatgatactttgggccagccctcttctgatataaatggaatgcttagctgtagatattgagagattatcctgtttccaaagaactctcacttatccctatcatttccagttattctccattcaaaactggctgggcttgctgtcttaatctatttgggctgctataacaaaatattataaactgggtggctaataaacaacataaacttatttctcacagttctagggactggaaaatctaaggtcaaggtgtcagcagatttggtgtctagtgatggtgtacttcctgattcatagacagcactttcttgctatgtcctcacgtggctatagatacaaggctctggggtctcttttataggcactgatcctactcatgagggctctgctctcataaatcacctaccaatggcctcacttcctaatactatcacattgaggattaggatttcaatatacaaattttgactgagcgtaacagtctatagcagtcagtctatagcattctgcccctggtcctccaaaatttgtgtacttctcatgcaaaatacattcattacatcctaacagccacaaaagtctcaactctttccagcatcaactctaaagtctaaaatctaaagtctcatttaaatgtcatctaaatcatatatgggtgagactgaaggtacagtttatcctgaggcaaattgctctccatctgtgaatctgtgaaatccaacaaggtatgtgcttccaaaatacaatagtgggacagatgtaggatagacatttccattccaaaaggaagaaataagaaagaagaaaagaataatggatcccaagtaagtccatactgcaaggtaaaatccatgagattttaaggctcaagagtaaccctctctggcttgatgtcttgaccttcaggcccactgagtgtgtcaccaggagactgcctggcagtcccacctgcaaagttctggcagagactctgtctagtccttgaaagaaaggcaatggtcccccacttttgaaaccatgaggtagatgatctctgactctcctttgtgttcactcttctattatcttgaagaatagagcactaattctatggttctcctgtgaaagccaataaatctgacaggttttcctcattccttcccatcttcatcaaattaaggattaggatttcaacatatgagttttgggagtttacaatcaatctataatacttgctatataagacttctataacaaacgcctctaaagctataatgacattttaatattaatgtcaattacaaagtataagctataagcccattagatagaactttgaacccctgacaatgagaactcatgttgacctgaatgaacagagagtattttggtcattaaaactaaaagctaagaatctttttgaccaagaagggaattaacatttaaaacacctggtttgtgcctttgtacattatattatttaactgtcatatctcatatcagcaaaatcggcactatttgctctattttatggatgaaagaaaatacaacttagagagattatttccctagctcaaggctgcagagtcagtaagtgaggaggtcagcattgaaatccaaatattgaatgacaaagtccgcactaaccaccctcggacactagtgacacaagagatgatgttaaacatgaaatctggatatattgaaactcaaaatgagacagttatcccttaaaattttttatcctgataatgtataaaagaaaattttagttttatattacagcgtatgtttctgtatcttttaacatttttgtgttcttcattttcaacatagaagagaaagacttcagactcagaacattaggccagcaatagtaccttgctagaatttaataaattttttagttttcataatttgtattttgatttttctcatctatttgtgctaagtgatactgattttccatcagtagtagtaatacaaagctccagtgtttagatatatttaattttaatgtgtcaatttaaagaaaaaacagcatctaaatataagtaatggtgacatttgaaagactgatgtgtgggaagcacatattttgttttagatgtgatgctagaaattcttaaaataatgtcaatgcttgaataatatgatgtgtaatttcctctaaaatttctcaatattcattctgtgccatagacaactgaatttttaaaatattgatcccagaacatgacaatgtttttcttgcaccataaagaaaagcttattgtttccattttgaaggatttttagcaatgttatatactagatgaactacctagaaaaattgtagtttaaaaacagtcctccactcctaggtaaaataacttttacctggagtcctacaggtaaaattcaaaaattgacctagaacaattattctaacagtatatttaaatatattttctaaagtttccatactgaagttaacctcagggaagactttccttgtatctttgtaccttgtacctttttaccttttatctggtaccttgtaccaaaagcatctaatgcaaatttattgacttcttcaataaatatttattcagtacctactatatgctaagcattggacacctgggatgtatcagtgaacaaaatagacatgattttatgaagcttgcctttgtagaactaattggaaaagagaaacaataaataatatataataataagtagtaaaaagaatgtaatagctgattcgaaataagaaagattggaaggcaggagagtgttgagattagggttgtgattagggttgtctgagcaggcttcattgaaggtgacattaagacaaagacttgaagagtctctcgccagtaagagtaggtagaggaaagtacaagcacagtcccaagggagaagttcaaaaaatatcaaggagacctgagtagttgtagtgtagggtgtaaaggagtggaatggtgggaggtgaagtgtcagaaaggagatagaataacaatgatctatcttatcttttaaaagattcaccctgtcagctggttgccagaagagaaataagaatgaaagctgggggacaagatagaaggacattataataatacaggcaagagatgagagtaacttggaccaaggtggaggtggagaaaagtcatcatattctggatatattttatagataaacaatttctggatgaattggatatggagtgtgtaagaacaagaggacagtgcaggatggagcattggagggtgaatcactgtcactgtagcacagggataaattcacactaggtatttggctgttgggcatccagattttaatgcaatcttctaagctcaaaaaggttaatataagaagaaaaatatgtaaagtgtgtgggctttgcctctatgaccaggtagatccgaattatgaccaccacttcttgctagaatcttccatagtgttgacttttgaaggtgtttgtgtatgtgtgtatttgtataaacataggatcttgttaattttcatctctaaaacccatcactaatgacttaattgaaatgcaactcggtgttctgctagtaaacagtcctgatgtgtatgaagtataatatgaacagtgatgtgtatgaaggtatctcaaaaacaaatgatgcttaatccaaccaatgtttccccatcctcttgtgaagagttgtcacttctgatttattctagcttagtatcatcaacatttgttaagcagtgtcccactggggtctttgctccttgatttgttgtttttttaagtaatcatatgctgatgagattgggttgcagataaaagatagtaactaaattgcaccaatgaaatatcagtttgggtgattcagcagaggcacacattttatttgacaagtatttactaaccttcggccatgtgccaggcactgggatcataatggtataaagatactgtccctacctcaaggtgaatgatgataaggtatgtttagagctgtgacattactagtgaatgaggaagaaagagatgggtttcaaatgtatattatttgtgtacatagaaaacaaagatattctatataagttctcaaaaaatacaccatttctcaagaaacataccattaaccaaacttcagcaaaagtatttgaagtggtttgctgtgtccccacccaaatgtcatcctgaattgtatctcccagtattcccacatgtcatgggaggaactcgatgggaggtgattgagttatgggggaaggcctttccattcttgtgatagtgaatgagtctcacaagatctgatggttttaaaaacaggagtttccctgcacaagctctctctttgcctgctgccatccatgtaagacgtgacttgctcctcctcaccttccatcacgattgtgcggcctcccctgctatgtggaaccttaagtccaataaacctctttcttttgtaaattgcccagtctcaggtatgtctttatcagcagtatgaaaacagactaatacagtgttcaaagattcttctctcaaatagtacctgtctctgagactgaagttgttttgtttttttgttttgttttgtttttagagtcaggtcttactgtcacccaggatggagggcagtgatgcaatcacagaagctcactgcagcctcaaattcctgggctcaagtgatcctctcacctcaggctcccaagtggctatgatcatcaagaaataagtcaaaataagagttcaagaatacaatgtgtgaactcaacagttccccttctaaatattcatccaagagaaagaaatataaccacccaatgacttacacaacattgttcagagcaactttctttgcagcagctcaaaccagaaataatttaaattgcattccacttgagaatggatggacaaatggtggtatattcatacaacggggcaacactcagcaataaaaagaaaaaatccaatgcttataatagcatggattaattttgtagacaattttttgactgatgggagtcaaatattaaaaggtacatactgtatgattctatttacatgaaccaaaaataaccaaaactaagctaaggtgttataaattagggagacactttcttggttgatgaaaatattctatatcttgattatagtattgattagatgagtatatacatttgccaaaactcattgaactgtgctcttaaaatctgtgccttttattataggtaaattagactctcaatgaaaaaagagcagtgaggggaataaaatttaagtattgagcaatcagaaaattacattaaataaatttagactctaagcaatacaatgttatagtggctttttctagacaatagggatgctactgccatatatatgacttatcacattagggtattttaaattgtttcttctgtttctttctccctcattgaaatatgagctctttgcaggaacctcgtgaagagctcagatatgctctttgtgaagagcataatgcatgtcacaaggtattttttaagaatctgtcaggtcctcagcctaggaaaatcatacaaggtaccagactggtatcttgcaaggtttgctttgaaactgctctatatttatgtcttgccccatctggatctgctccatgtttaattctctcatttttttcttattagtttttcatttgtttctattacaaattcaacttaaaaagcatactttcctacatttccatcccaacacccaaaggtgttgaccttttcttatgatataattaagggccaagattggaagtaagtattctaaagcataacagccattgtggtaaaaataaaggaattctctagtgaatttgattcactctgctctattttgcaggttttttgcattatgggttattgtgtttaggtcataaaatgtttcacatcttgctgtgctagcagctatatcttatttgtccgttgctgcttttcttcaacaaatacaagtgaaataaggcaagaggctaccactgcaggtgagtccatgagactggctgcccatgagtagccatgaattaccatgtctacctagtttaccacagtcttgcttcactcctgaatagatgtacattaaagtcatgtgtgcagtgaggcagcttttcattactggcaaggctaaagaaactttggaataaatggctcatttttacaatgcaaagtctgatttcataccagaacacattttagattatttggtgtctttggttgggcataaaagcaattgagaactgggctgaaagggcttaatggtgttttatttaaagtgataatcctctgaggcattattcttctctcaaatagtacctgtctctgagactgaagttgttttgttttgtttttttttgttttgttttgtttttagagtcaggtcttactgtcacccaggatggagtgcagtgatgcaatcacagaagctcactgcaacctcaaattcctgggctcaagtgatcctctcacctcaggctcccaagtggctagcagtacaggtgtccaccaccacacctggctaattttaaaaaattatttttagtagaaatggggtcttgctatattgcccaggttagtctcaaactcttggcttcaagtgatcctctcacctcagcctaccaaaatgttggtattacagacataagccactgtgcctgacctgagactgaagttttaaatgcatcttttctgaatcctataagaggatttctgagggtaattcaaatttgttcctttgaagaagagctataatacacgtaagaacttcaaaatagagcaatctccaaagaatagggaagatagggaattaacagcgagaaaaagcgaacaaacaaacaaacaaaaaaacaacttgggctgtctgtgaagacacagagctcattggattctgatgactaagaaaaagacatcctggtcaggcccaggggctcatgcctgtactctcaacattttgacaggctgaggcaggaggattgcttgagcctaggagtttgagagcagcctgggcaatatagtgagaccccatctttacaaagaaaattttttttttaattaaccaggcatggtggcaagcacctgtggtcccagctactgaggaggctgaggtggattgcttgagtctggtgggtggaggggatgcagtgagccaaactgcactactgcactccagcctgggtgacacagtgagactctgtttcaaaaaacaaaaaaagaaaaaagaaaaagacatccagaagtcctgatgttttagaatatacagtacatctatgtgtctacatttacagggtgaggggtgctctgaagagctcaacaaatggtcctattgaaggaagacaatgtttatgatgaggtttaggaaagaatgttagcttaaagagcaagtgacatcaatttcttcatttacttaacccctctaaattctgagtgacctgatataaggaagcttatccaaaagggggcctataaagacccaagggcatatagaatataaacgctgcttggaaatttttctatgaatgtggaaaattacttccaactctgtcttgctgttttccttttattctgacctgtgtggtatgagagaatggatgaaaagaaggcttattaaagctctgaggtggggaggcaactcagaatgttcagaaatcactgaacagagttagaatacctgatcttgtctcctggcccttatctgtacagaaaaaaataaggcttttataaatttcatttcagcccattctaactttctttaactctggctcaaatctttttcagtttgaaatgatcctcgacccttctctttttctatttacccaactgtcttcatgtggaatagtttgtatctttaatcatttgtgttgttcttcatcaaaagatggttactgacagaagttaccaatgttttttttttttttttgacggagtctcgctctgtttcccaggctggagtgtgcagcggcatgatatcagctcactgcaacctctgcctcccaagttcaagtgattcccctgcctcagcctcttgagtaactggaattacagacacaacaccacacccagctaatttttgtatttttagtagagacagggttttaccatgttggtcaggctggtcttgaactcctgacctcatgatccacccacctcagccccacaaagtgctaggattacaggcctgagctactgcgcccggccagaaattaccactttttttatttgctgctctgaggctcactgtaaggattttctgcaaaaactgctcatatggaccccgtttctcactattactttcatttggaaaatttattactatgacaccaaaagctgctaaggaatctcccagtagatcccttgtcgggctctgaagctcttaggtccttcaaagggtcctgcttttgcaaaatcaatcaactcatttctactccattgatggtggaagttcaagtatcacattttatgagaacaggactagaggtcccacttgagtagttcctttaagacttcaagattccatgctgctatgaggaatgttcaggaatatcaagcccattttgcttcctgctccccaatttgctgtccactccaagcctccatccaaaggtactcccctgatccaaggtactccagcagcaagcagaaggacactttttatccttctctagtttgtctgactttcctagttcagattcatacaaaacaacagacaccccaactaacttttctcctgaaaggattcatatgcttaatctgctttcatttatacaacttgctgattttcctctgagagaagtctacacaggcttacttgcttaaatatgaataaaactgagacccagaaacattaaaagaccaatagaccgccgactggtcttaacctctgcagtcccaccctctttccctccatattcaataaaaggataaggctaggcaccaggtcatgctgtattttcatcatgttgtattttcaaaggttgctgatgtaccataaaaaattccgtcttgattatatactcgagtcccctggtaagctgggcatggatagttagatatggatagttcttttttaatctttgagttctgtatttctttttaagccacatttttgcccaattcctgtgtaatcagataacaagaaagatatcagagatcaagtttcatctggataactgggttatgatttcatagaatcatggaatcacagtgttagatggggcttctcacacctttctttatttatataaagaattgtatctcacactttatttatataaagtactacagactagaaagtttaaaagacttgttcaactcattagcttttagattttctgtcttctagatcagtgtttttatttcctgagtgtttagtatgttaaagattctttgttagattctgtattctgccctctgaatcaagaaacaagccctcattcattcattcatttaacaagaattcattgtaatctcttgctgggtgttaaaggagctgcaaagaattatgaaatattggttgtacccaaatcttacaatctggttacaagttttaatgtgcatactagtagctccatttttttcatttaaataagataagaaacatctggcttgctacacttaatattagactgaaaacaatattgttttgatatatggtcatttaaactctgtagcgtatgcttatctttaaatattttgcaatgtggctgatgaaggcaacttggccttcatacctaacctttaaggagagggtggttgcaatgtgactttgcaactccagttatttttgcattcattagaagttgcttcagagatgttctaaagctcatcctccatcatttgctttcagtaaggtttttaattaccgcacactcagtgaaaatgaaagttctgaccctgtctatattcagaacatatggcacatttcaatcccatcaacttgtggtgatgggatgtgacagtctccaagaggctgatttctgaactgtgacattgccaagcttgtgccttgctggcatttctatcatggaaggctcaagagcgttgcagtcagtgtcaaatacaggggaccttgggcaatttgctaacctttccacacattcattcggtgaaaattgcccagcaatctgtaactacaacctgcaagcttgcaatgaggactgaatagtatgtgaagcatctagcacaatgcatggcacatagtatactttcaataaatattagtttccttcctctttttcctgcataaaaaaacttgtgataagaagttaagtgtacagaccgggcgcagtggctcatgcctgtaatcccagcactttgggaggctgaggcaggcagatcacgaggtcaggagattgagaccagcctggctaacacggtgaaaccctgtctctattaaaaaatacaaaaaattagctgggtgtggtggcacatgcctgtagtcccagctacttgggaggctgaagcaagagaatcgcttgaacccaggagacagaggttgcaggtgagccgagatcgcaccactgcactccagcctgggtgacagagcaagattccatctagaaaataaataaataaataaaataaaaaggaaagaagtgtacattgccacttatttctgcctccttgctgagaaataaggaaagtacttaaaaaacaaacaagtttaaatatatgaaacaggaatacttcccaaatggtctctagtatatggattattctgtggctgcaagagtgagacagtgaactggatatatatacttttatgcaagctaagtacctgctgactctgtaaaattgtgtctgggcatttggttccctgtataggtacaaaagctagacaactttccaaagcagacaagagcatcaactttgagagcaaaatagcaaacttatgatcagattatcttctccttgttaaattaatgaaatctgaattatatatggatatgaaattggggtgaatgtgaaaggagaaaaaagagaaaatggttattttctaacccttgttcattcattactttggaaagtggttcatttgagtgaaggctagggttagtcagtctatgctaatctgagaataagggaaactgagttagggaacacatacaaatttctctttgggattttttgacaaagaaccaaatttcaaatcctataaaagcagtctggtctcaaaatgaccaaatagcttttgttgtaggctgaagatttaaaactctatgtaatttagtttcaaacttgaaaaaaaattttattgtacacagttggcccttgcgttagctttattgccttttactctgttttgtaaatccagttgcactgaatttaccaaatataagaattaatttttttctctaccttggttattaggagtatatgtaagcaatctcccaagattactgaagtgtttaccaattccttcttacttcctggaagtggtatttaacattacactgctactggtaattaggaatagagagtcccttgaagaattattcggggtggattttgtcaagttttcctattgttcaaaggagtttatcaaatataaatgggaggcataaggacccctgaggagactcagaggtctgggaagcaggaagggatttggacagcataagactacaaaaagtaagatgatttgatttgtgggcataagaataaatgagtaaactgcagttatatgtgtggaaatttacattgtcgtgcacagctatgttcctcctttctaatacaccctcatttccttttgtgaaaggaattactccccagtttgtgtagtcttgatgggagaaaaattccatgtgctctcatctacagtggaaaccaacacaccacaccctttctgtcctgttcctgatatagctgtggcagccagtctgaaaaaatattttctccaggcctttcatcttgaatgaataatgaaggctggaaggaatatttggaagtcacacatcgcagcagctacatcagcagaagggacagcatctgtccagaattctcacaatagggagattgctggcttcctgtttcttagcctttcaggggtccgtccagttgccaaactcatttccccagccttctgtggattctctctaaattcccagtattctctaacaaatgtccttttctgtaagttagccaaagctagtttctattgcttgcaaccaagaaattctaacttatctaggccttcattttaagcttgcctcaaaatacattactctttatcaatgaaaacgttggattatcagtggagaattcttaaaatgaaacgggctctggagatcctgtaagccaacctcctcctcctccttcagttttctggggcaaatatgagacatgtgttgattaccctgtaaaatgtgggaagattttggcataaaggttaagtgagttggcaagatatgtctttccaaaaaatggaaagaaagggaacacagttcccttgagacctctgttgtttacttgttgatggattgagttgatgttggacaggcataggaatggtgtggcaagaagtatcatttaaaacctgtccaatatagcattcttcaccctcaactgctcaccagaactggttatttctagttactctctgcacttgtttcttcaactgtacagtggagatgaatactcactacctcatagaaatactgagaaatttaaaagagatgagtgtgtgtttctgggatcagaacttaacaaaatactgaaagttatttttaagaacagaaattgttatgatatgcattacaatgggatttttctggataccagaacttctattagaaagagatgtttgtaataattgcaaatgcaaaataagtaaagcaaacattatttgcatagtatgtgttgcatatagaaatgcagcactcaggtccccctgcaaaggacttgttgcccagctgctgagaatgcggttaactggcagcccctgcaaggactgcctcagctgcagagagccccctcaccaacgatcatgtccttctgtgagcagccacatttattggctgttggattaaggtgtgataaatgtcctggccatttcagcccactgtcagacagctctgtcaggccatgatagctccagaacttcccaagagattaggcaaggctgtcactgggctgtcatcacagcacaacttctcctactgcccaaccttgcttgtttccctttcctcccacagatgttagtccgaagggcattcctcaataaatatcctgaatgctaaactcagaatctgctttcaggggaacccaatctacaacaccttgtattgggcattttatattggattgttttaggaaaattctgagatagacctaatatttttcccattgtaacaaatgagggaattgagattcagggacgtaagcaacttgtctaaggaaacacatgaagtgacaacactgggactcaaatgtagtttggtttgattccaaaagtcaattccttccagaaattattaatatatctcttcttagtctgaaagaacaactttcttccccagagggagcagctgggccctgcgctttgggcagggtcaaagtcatactttccacatcattgtttaggttggttcagaggagatttccttttgcctttattccttggcattcttctctacttcctgtgttaatgcctattgttttagcctaaaaatagcaagtgtcagcttttacacattttcaaaaatttcaatgtaattatttaaaaataggctccgaaattttgttttctctctgttggcaaccgtggttgctatggagttcaagtaatagattgtgatgtttaacactgaattaattactacttctcactcctagggaacatctaattatacatattcatgccaagcaggatttggttttaaggaaactgtgcgtgtgtgtgtgtgtgtgtgtgtgtgtgtgtgtatctgtgtgtgtctgtgtgaatgtgggtgtccctttactgtaaaatgcatactggggaagggtcttggtttgtgatcttctgtaagacttatttgtcctccttaattacattttctcctactaagtctagcctatattgagatcaaattgttctcttattcatccaaatggcttttccttttacatgctaatggtggcctcttttattttgaaaattatgttgagataaagcagagtgatttcctctatttcttccctcagttttgttctcttgatcacatgtatcatgagtagtgaagtattactggatgtatacttttggaatcgtatatcttttggaatcacataccctcctgagtctgaagcctggtttgtttgtgtttttttgttttgagatggagtcttgctctgtcacccaggctgaagtacagtggcacaatcttcgctcactgcaacctccatctcctgggttcaagtgattcttctgcctcagcctcccaagtagctgagtttacaggtgcccaccagtacacctggctaatttttgtatttttagtagagatggggtttcaccatgtcggccaggctggtcttaaacccttgacctcgtgatctgcctgcctcagcctcccaaagtgctgggattacaggcatgagccaccacacccagcctgaatcctggttttaccacttacttaatttatggcaggtcatgtcaggattcaatctcaacaacttcctaaaatggggatgttattatctactacatggagttagcacaaagattcaatcaggttttaaacaaaaacattgtgcttcttgtttctcaaactttaatatgcaagatagagatcttgctaaaatatagattctgattcaacaggttaggcatagagtctaaggtttttcatttttgacagcctcccagttgatgttgatgctgctgttccatggaccacactttgagtagtgagaatttaaataatgctgggcacctacacaaggtcaatgcatttgcagctatgagtattggcctttaattagtctttatcctataccttttgaacagaagagcacaaaaattcacacctattagtgacatggagaaactaaggcacagacaagcagatcctataatgttaagatgactccactggatgtctctgctgcattttgtagccttacgctgtgaagcttctatttttccctgtatgggctgttgcaactcctgctgctcctaatgggagttacccaagcatgtgttgagggaagaacataaatcctgtggtgtttttatatactcaactaataaagcagttttgtgttttcccaaaaaaaaccaatttcttgacactgacagtaaggcattgaaaaatttacacctgttgattgactcatcagatgaccatttaaaaaaccggatttagggtgttcctttgaaaattgagctgtggctcaaaagcttatgagacctaagtggttgaaattgcaccaagccacaaggtgcactttttaaatactgaaatgcagccccttgcttaagagatcctgagattcttacaaaacaagagttggcaacctttcagatgtgagtaggtggtgtttcttttatttatactcttttcatttaggagaggtggtaaaatgttgcttattcaagaaggttaggacaagacttttctgtatcccttttcagtcattcaagagaatacgtctctctgtaacttctgccatgaacatcagtaacatcattttatgtttcgtgggccccctggcttctttccaggaatttctgtgttgttctggcctgcacttttcaatcatttttcccttgctggcctttgccactctatctttttgcatcttggaccaaggctaatacgtacctaccactcttctttttccctcaggctttccttcatccacatctccataggacagggtggaaaaacaaggatcaccaaagccctccaatggctgtcttggcccaacatgttttgactccttgctaacttctctgacctcctgtcctactattcacccctcatttactgcatttgagccacatagacttccttgctgtttcttgaatataacagatatattccgctttagggccttccgttgtttcctttgcctagaactctccctgctcccaaccccttcatagcagccttggtaactccctcctctcctttaagccttaccttcgcaataaagccttccctgactattcatttaatatcgcaaactgcacatcacggctacactcccactcccacactccagtttcccccaaccctgctttgctttctcttttttccatagtgcttgtgacctttccacatgtagtgaaccaaagtatttgcacctcctcatcctttcccaacattgctgatgtgtgctgaaaatgccctttacgcccacattaggcaaatgtaagtcttcaaaaacagcagaaacacttcttcctgaagaaaagttaaagctgttctatgtcttaattttgatggtagctatacaagtatacacatttgtcaaaacacatcaaaatatacactttaagtgggtgcagtttactgtatgtaaaatataccccaataaagttgatttttaaaaagacggtataatcatagaccttgggtcatggtgtaggtatggggtaggctgacattatagggtaggggtagaagttggcatttaggaaggtatatttcttcctgggaaatagtgtggacaaagaggtcagtaaaaaattacataatgcaaatcactccctctggctttgagtgactagagaaaatccctgggtgttaagctcatttgctttgtccttgttggctcttctcttacttgtagttactgttagaaatgagaagatctcaggtcagtttagttgtatcttgttctaaagtgagttgattccgtttcaatcctaaaagtggtggggattcgaatctaactcagaaaactgcagttttcatctgagaagaaaactgctcgtatttcctgtttgaaaaacaagctaggaaaagtaaatgattgatctcttctcatgttaaatccatccaaaaattcccattttaaacttttcaaaatgagtcaggcaagtctctgatgggagaaaacacagtcaaggaaagtaacaacaataaaaagaagatataaaactaaattccattgcctatgaaacactccccatgatagcatggaaggtttgagaaaaactcatcagtatctgagtatcagtcttagccctggacatattaaaacctattgtcctaaacttggaaaagtctttaaaatgctcatagaagcacatataattaagtagctataattacagtgggttttaggatctttttccatactccaagtattctatatgtaacagagaaatctaacagctgactccatcttgcctctaacctcacgagctaactgcctttgctcacccctgcacataggccaagctaactatgggaagaacttagtttataattcaactttaaagcaaggataatagtcccttcccaaaaccaactcctgagtatataaggagggtgtacacacaagtagcaatgttatgctaaagatttataggaacactgtgaactaaccaaagacaaagaagttctgcaaaatctctggacccctctgctgatacccagatgtctgtggtcactggttgcctcctgatcgcaaccccttgtttgttcccctttccccagtataaaaagaagcttgagagtcatgtcttttcagatagttctttaggatataagtccaccatcctcttggtttgctggctctctggaataaagtcaccttctttgttccaacaccttgtctctcgacttactggctgccaggtggcaagtggcacaagcttggacttacttacatatatatataggcaggttctggaatcttcccatactggaatagatggcagggtccttgtaaagtactccatgacatactaaaacttccattgctctaaatgttatcaagaggatgtatctgcctgtatcctgctccctcacgctagaatttagctagcaaatataaatcttgtgtgtgaatgcgagaggtcagatttatttcaggtgctcttagatgtctccctaaagttaaccccattttcaattcttatccaaagaattttttttcccatcttctcaagtaaaaagtatttgagaatgctttctttttcactttatttataatatcagttttccaattttttgatctcagaacctaattcctcatatcattctttaaaatatctagtgattctttctgatttgcatgctaaataatacttccttctaatcctttacatcttatggatatttttagattgctaccacatccacatttaccaccttctattgctccctactgggtctgcccagctaaactatacgtatttaactcttccagtcttccgttatccaccagaccaaccagtctcttaaaatggtgttggcctcctttagaactcttcttgattgttgatgccctgtggccctgcagatcatctctctgagatggcatttgaaggcactcttaaaattgcatttcaggccgggcgcggtggctcacgcctgtaatcccagcactttgggaggccgaggcgggcggatcacgaggtcaggagatcgagaccatcccggctataacggtgaaaccccgtctctactaaaaatacaaaaaattagccgggcgtagtggcgggcgcctgtagtcccagctacttgggaggctgaggcaggagaatggcgtgaacccgggaggcggagcttgcagtgagccgagatcccgccactgcactccagcctgggcgacagagcgagactccgtctcaaaaaaaaaaaaaaaaaaaaaaaaaaaaaaaaaaaaaaaaaaaaaaaaaattgcatttcaatattttatgcttccattaaaaataagcaatacagaaagagtcttgtggtagtgattaatgatgtttgtcaagtattcctagttttctcccttctgtacacacggtaggaacgcatttcctgggcccttatgattggcaggggcttgtgactggcaagtgagttatgagtaatgaatcacttccagaccatgaaagaccctctagagtgctgttttctctctagaatggtgactgccaatgttcgagatagtggctgctctgttagccttatttcttgagttgctacaatgaagagaaactcttatgccaagctctactgtccatgtaacaagaacaaggagtatactcttgtcattttaagcctctgagactggggagctgtttgttattggagaattacctaagttgtcctaactgatacaactctagcagatacccttagatgcccccatgtatataggtgcctatgttacactcagcagtctgttataatatagttctgaatatgtgaacatggcaaatctctactggatcctataccatataaaattgatgcctttacctagacccttgccgtgtgtcagtcagatagaaatcagtccagaagaggtaacacattctgaacctcttgtcaaagacacagagacccaagatacagaaaaactaggtatcccccaaatcttcaacacaagaatttcaaaatcatgtctggtataattaagcatattggatcttggactcaaatactgtgacagcagcaggaataaataagtgttctgggacttctccttcccagaacccaatgcttcatagcacacaaattactccttcagctggctgccatttgatatttctatttaaaaatgaaatcaatgagcttatttttccactgaaaaaatggttaacctgtttctctcagacttagataaaatggaatgttttagataagctacttttaaaagattttgaatgtaacttaatatcatcttggttcatattttaaatgtgtgtatgtatgcatatgtgtgtatacatacatacaatatagaaaaaatatattttaaatatatattttaaataaatacatataaataaaatatatttttaaaatatgtatttttctatattgtatgtatacacacatacatatatacgtttgtatatacatactatatatatatttaaaaaacgtgaatggatttttgatatgttaactccttctattctattacaactactctcatttccctcttttcttttcaatctttatcactatggaaacatattttacaaacttcaatttatattacacatagaaattttgttctttgtattttatctgccattattttatggattctttaatttcaacatagtcttcccagattttctcccatttttatcggaataagtttcattagactgaaattctattaaatgatgtgaaattgccatttataggtcaaaaatagttgaaaagacaattaagtcaatataatacaattttcttaactattctttagtggttgaacatgctgattattttcagattttaacctcagaataagttttctttaagtatccttattcattgatttaaaaactacttttttagtatatatgcccagatataggattactacctaaaatgttattctttcctttattcctttctggtgaacttccatgtatcctttgagatccaactcaaatgtttccctttttgtgaagacattaaatattctccctgctccccacaacactgtacgtattttgcagcactaactcttccatggctcctgaaagtttcagtctacaagtctgccttcactggcctctcagctgtaacttactctcttgtaagtcatctgtgttgctaacagtgcttggaacacagtaaatgctcaatatgtgttatgaaatggaatgagtaaatggttgtgcatgctctcaggcacacaacatttgcatgtgatatttgatatttagccctagggctgttggtctcaaggcagagctctgaaaagctcagattcttttgtttttatttgaagaggtgggaagtgtgctttgagctaattgacaaccagtaggctccaatatctttgtttttgcccctcagccctggttcctaccttaactggatattcacctttcttggcatcatactgtgctaaatatttgtctttgactttttccacttcctgagcattcattttgtacctgccctccactctccaagttcaatctctttagtttgctttcaccttaatgtctgtaactttattgattctttaaaagagttgtttttatgtaaatgcttcctgttttttttttttttcttccaattttaccaacttatttccaccttctctattccttcttggggagccataaagactgcatcctaattgcaatcctggatgattttgactaaaagttagggtatagggtaaaattctctaatttgttctttatggacctgaagacaggcaggcagcacactaaaatttctagtgaggactattgatttccaagccctccttcatggacggcgcactctcctatacttaaatatcaagcaataccctgcaatagtgcttctctgaaaagtagtgttctttcttttgccagttgttagctgtgtgaccttgagcaagatgcttaactctttgagactgtttcctaaccaggatatttatagctatcacatgaagatgaagaggttaagtgagatgatgcacttaatatttcaactccttaacacagtgcctgacacaatatccatgcttcctaagtattgatgtactctttattttgaaatgtttcatcctgattaactatactatttgttaacttgagaaaatctacataatgccctcccgctgggacactcagaggactaagaacttttatataaggactaatttgaataatattctcagagagagacttagaggcagggttgggacagaaggaaaatgtggaagggtgaactcccatggaaggtactttgaatacatagtagaggcttcagttcgtactaggtgacttttctgctggatgcaaagccattcactgagttgtccttctttcatttctcttaccatgctctaatgtcccaactcaacatatttacattatttccagataggaaaacatctttatatatatatattttttaaaccactctactgagatacaatttacatataaaaagctgcacatatttaaagtatacaattccatgagtttgagaagtatatacccatagaaccatcactatcatcaagaccataaatatatgcatcatctcctaaagttttctcccacctcctttattattaaaattgttaatatgtgtatgtgtgtggtaagaacactcaacataagatctaccctcttattgtacacacttcaagtatataatacagtattgttagctataagcattatactgtataatagatcttcagagcttatttatcttgtgtaactaaaactttgtaccctctaatcatcacttttccattttctcctttcctggtaaccaccattctactctctgctctatgagtttgactattttaggttccatatataagtgagatcatacagtatctttctatttctggcttatttcacccagcataatgctattcgggtctatcaaggttgtcacaaatggcatgatttccttcttttttaaggccgaataatcttctattgtatgtatacaccacattttctttatccactcatctatccatgaatgtttaggttgtttacatatcttggctactgtgaacaatgctgcaatgaacaaggcagtgcagatatttcttccagatccgaatttcaattcttttggatgtatacccagaagtgggtttgctggatcaggtggtaaatctatttttaatttgttagaactctccatgctgttttccataatggttgtatcaatttatactcccaccaacagtgtacaagggttccctttctgccaaatcctcactaacacttaactaacacttacctttttttaatctatgattgccttcctaacaggtgtgaggtggtatctctttgtggttttgatttgcgtttccctcatgtttatattttcttgggagaaatgtctattcggatcctttgccattttacaatcaggttatttgggaattttgttttctatttgtgtgtatgctattgagttgtagcagttccttgtatattttttatattaaccatttatcagatatatgacagacaaaaatattctcccatttcagaggctacctcttcattttgctgattgtttcctatgctgtgcagaagcttttcattttggcataaacttgtttattacttttattgcctgtgcttttagtgtcatatctaaaacattattgccaagaccaatgtcaagaagcctttcccctacattttcttttggaagctttatggttccaggtttcacatttaaagcattaatatcattatatgtttatgagttctctacttctttctcctcctcctcgtcctcctcttcttgattcttctcttccttttctacctccttattctcttccttccactcttttcttcctttccatgactccttttcaattctttttcttgtgtattgcaaaagaagatttttgtctattgcaaggataaagtctaatatcctgattacttaaacctacttcagataattgatgacccttaagaaatactgtcagcttttttagcctggtccccttggaaatatttattacctttttgtgttacatttgcaaatctctacaataacctatcaggtgatattaccttttctcattcatattaaataaacattgaagcttatgatttgtttgtccacatttgatttcctattagcatatattccactggttttcattaacccaggtgtatttcaattgtcaatcttatctaatatttattaccacacagttgtgtttgagccttcatattttgacctcactttttctgggtatttattaaagctttgtgtataaagcgggaaggggtattcactttctcttgcttgttataacaaattactgcaaattcagtggcttgaagcaacacaaatttattatcttacattctgtgtgttttaagtctgacagatctcactggctaaaatcaaggtgttaacagagctgtgttccctctggaggatctaagggagaattcatcttctcatcttttccatttcttagaggtcacctgcatgtcttggtttataactctattgcctcatccttaaaccagtaatgatgggttgggttgttctcatatcacatcactctgacctactcttcagcttctctcttctactttttagaactagtgattacattggacccaccaggataatttaagataatctccctatattaagttcagctgattagcagcctaatttccacctgcaactttagttcccctttgctatgtaactaacatattcacaggtgtacccgcacacatgcacgcacttacacaagcatatatgtctacactctccaaagagatgttctgtatcattagaaaaaccacaggctacttttaccaaagatacatgttccgtccattctgatgcttttgggtgaagtatcttctggaaaattactagcttatattacagtgcttagtttaccgtttacaaaaatccctttcaatacaataaattcttctgtaaatgggcaaagaataattttattcttttccattttataatgaaaactggcaaattgccacatttctttttctatattctaagaacctcaatactgagtttattagataggttttctcacagaatgtttctttactgctttttccctaattttcacaaataacacatgaaacagttctattcaaaatattttaaagattgtataatgagcttattttttgaaaattcaaatgatataggataaggcaaacttgttgctacattttgatgaccaattcttaaaaaataattatctcccatctttttttttctctttgagttttagtttgagtagtttctattgattgatttttgagttcactgacaccttatcaaagtatttcctcattatagtgactgtggtttttatttataagatttccatttgactttttcttatagttcctataaattcttcttttatgcatgttgcccactttttccactagagccttaaaatatcagtcaattgttattttaaatcctctgtctgagagttctaacattgagccatttttcagtctaattctgttaattaatttgtctcttaacagtgagtgggattttttcttgcatttttgtgtgttttgtaatttctgattgaatgatggacattccgtttaggacagtagactctggggtagagtccttatacctgaaagtggacatgcctcttaaattgctctgctgttagtgtggggacttgagtcaaactagccaggagctgagctgagtttcagtgttgctgctatggttactttcagttcaacactggcttcaaagtcctctagcattaccttatgcttcatgccagagagtttttctcaatgcctccttccatttgcctttgtcattcattcattcattcattcaactaataacgattaaatatcttctattatgtaccaggcactgttctaattatataaaaataagacgggcaatattcttgctatcatggagaatatatttgaacattttctactatttcttttgcttttaaaatacatgttcattttaaaaaatatattttaaaataataaatatacaggtgagaacgtggggaaataatttacctcatatttttcagattaagatattaatggccatgctcatttcagaggataattaggcctaactgaattgtatattttaaaagtgtattcccctatgacccagggatttcacttttctttttttaacctagagaaataaatgtacatgtttacatggaggttaacactaggacattcactactacattgttttagagaaaaattgaggaaaaaatagatgtccattaataagagaatagaccctagttcatgcatacactgtgaaataacatgcaacaggtataatagagtagatctgtatataatgacctaagtatctccaaagcaaaatgttttttaaaaagtataaaattatatatgcgatatgatacctttttagaaacaatttttaaaacccaaaactataaatttgcctgtgagatgccctttgccctgaacaaaggcacgtgtgactttgtggtgcttcagtgtctggcttggggcaaggaaacttctgttcaagtgtccctttccctgatacctacactgacacccatcatactcttttccctctagagggtcactgtgtccccttcccttcatcaccacccccgccaggcactggcagcatagaatactggttcctgatctctaaactctgaatttcctaataatttatggccttaacacaaatgcaggtcccttgtcctggtgttatgcatacctttctctttctcttatctctttctcctaatcctggtaaacctctagtgtgaataagagaagcttcactttacctcctgtctctgtttaagcaatttggggaactgtgaaaactacaaacttcctcccttcttaaccgtctctcagaatggatgttaggtttttcgaaacaaatccaggaagacttttgtgacattcattcttcctttcatgctaccacctcgttctccagaggcaagggacatggagtgaccacatgttagaaaccagagcaagaaaatgagggaatagctttgttgtagtttgtggcttctaaaagtgcctaagagatatttttaaataaaattttcactttttccctacacttgtgtcttaacatctgctgaccaagtttattgtgttttcttgctccaggctgacaactataaaaattgttcctatttcttttttttttttttttttttgagacggagtctcactctgtcacccaggctggagtgcagtggcacaatctcggctcactgcaagcaccgcctcccgggttcatgccattctcctgcctcagcctccagagtagctgggattacaggcgcccgccactatgcccggctaattttttgtatttttagtagagacagggtttcaccatgttagccaggatggtctcgatctcctgacctcatgatctacccgcctcgggctcccaaagtgctgggattacaggcatgagccaccgcgcctggccaatattttaattttatgttctaattaatatttaaggcaaagttcatattttaaattaaatatcatttagttgtatgaggaaggatggcttccagccaacaaaaacgttctccttaacttcccagatacttttaggaagactcagataaagtttcaagcatccagttatatttaagacctgcctgaatatggctgcacagtatctaatatctaagttattcactagcatggttctagctgcatgttaataaaagtaaaatgactggaatttcatgatttccgattatttatatgtacatctggaagattttatttcccaaagaaggctgcaataatacattttattccacatgctcctcttaaaatgtgacctttccacattcatagatatgacaggcagagtctatttctctttttcctggacttgggcatatctttgtgactgcctcaaccagtagggcacagtggaagtgtcactatataactcgtgaggcaatgaaagagctgcaccttctccctagatctgtcttagaacacttgcttttggtacccagtcactaccatctcacacccagctgtgaggaatcccaggttacatgaagaaaccatttttataggtgttctggctgacagccggcatcacccagcagacatgtgagggaggcagtcttcaagatgactccagtccctgttaatgtctagttgcaacttcatgagagactctgagtgagaatcatttagctgagcctacccaatacccagactgtatgagataataataaatgaggatcgaatttgtttaatacctttaaatttgttgttttgtagacaggtataactagaacagcacattggaccaaaaacaaccctgaattcgaagtgtcaaaattgttgaaatcactggcttgtggtttcactgatactaaatttttccatccatctctttatcttgccacaaacatgggaagcacgagagctccctatctcatacatctgcaaaattgtactttacactagctatccaaaataatgtatctttccagggcaccaaggagagcaagcgatggccttcccagggaaaaacacatctttcagttttgcagcaggtagtgtatgattcatacatgggctgattggatgggaatgaggagagaaaaatcacagaatgggcaataagaattctgttggtttgactcaaggcaaatgaatctgggagtactcaggatagtgctcattttggaatttagtctgcttgtgactatttcccttaaataataaaccattcaaaacctagtggcttaaaaacaccatttctttaactcactattatgtgagtcagcaatttatgctgtgcttagttgggcagttattctggtctcagatggactttctcatgtgtctgtgcccaactgcagataaggcctcgctgatgacaagggcaaatgggaagactgggccacatgtcacttgttctctatcaggttagcctgagcttagtcacatggcagtggaatagttccaagagaaagagcagaagcatttaagcctcttctggccttggtttagaacaggcacgctgccacttctaccacatcccattggctgaagcaagttacaaggccagcccaatacaagggatggggaaatacacgataccttttcagcagatgaattgaaagtcacattgtaaaggatgtagaacacaggaaaaggtaaaagaaaaccatttttgtgatcatttagcccttgttttggtttattattgtgctagtcctacagatcaggttatataaagcagtctgatatgaagtaaaaacagctggattctaggcatttattcacaaggctcgagtcatacctcgggaagatataactaggtttgtgagtagttcacatattctatagatatttataatttgtattttttaatacttgccagctgcttgacattaacattttccctgtagtgtcccaatttcttgtgtctgaaatcatacgggttctgcttatagcagacaaactgagttccaccgagatatacaggttggtaatgattaaaccagtgtgaatgaatagggaggagaaaagtttcagaacttctacctgatagttgaatcagagaatcacaaatgttcagtggtaaaagagaatttcaactaacccctttaactctgatgggatggattaatcaataatgatttgtgtgtattagagagggagagagagagactaattgactctagatatttataggcacacaagagataaggtgagaaaaataattaagatgtattgatttattgtgcttgtaactagactttataaactcagatgctcagagatggagtcaaaccttaataagaactttaatttctcatttagtaagagattagtctttacggttttccactcttcctgaccaccattttgatcactgcttaatgttccagcaattagaggtacgtaatttacttaaccatttccccgttgttaaatactaatattgtcactagttccttatgtttacaaatagtgctgcaataaacatttctgagcacagcatgttctcctcagcttgggtatgagcttcacaagggcagagagttgtctaaagtatgggttttcagtggctagaacagtgcctggcacaaagtaggtgcctaacaacattttaaaatatcttttgaacagatagagttgtcctcatattttaaattctttactcaggagagagtcccagatgtctatgccttcagagtattcttacctgaatatctcatttgaggagaacaaatcacatacacagtttgtcttcaatgtagaaaaacttgatagagacagttagcagcaaaacttccttttgcttttgttctctagaaagagataacaaactaaatgagtaggactgactgtattagaaagctggacagagaaagggaagagagttagcatttcctgttttctgctatatgccaggcactgtgctaaatatgatactggcaacatctcatgtcatcctcacagatgtgggtgcaatcataaccatactcaaatgaaaattcatccctctaggacattatgtaatttgtcgaattccaaggttatccacctggctaatggtagagccaggatttgaattcaaacatttctggcttcaaagcatttcttcttcgtctttttatttatttttgtaacctttcactacctccctggaaactgaattggatagataacttagaaaatcctccaacaaactaaccttaaaattttctaattccagtcctgagtccatacaggttttccatctgaggccagaatgctaaaacccaaggcattaaagtgccaatttagggaagattgtctctgtgggttgctgacctgctctgcagtgactttcagctttgctttatcatgacctggtccctctttgaagattgtcaggagaaaagcagcatctttctctatgtccataaaatatactgttttcaatgattcagttttgagctctcagccacattaacaggttttcagggggagattccagggtttccctccgtgaacattttgtgctttgaggatgatgctaagggtctcagcttagatgtctgtattttgatgtcatttacagccttgctgtgagaaattcagtgcattgtgacataggtctttccattaaacagtgtctgtccgtgctgtcctgaccccatcccaggctaagtgcaatgtatagccagcatctgctgactgcctccccctacttcaattttataacacagaaaatgcagctgggcaatttgtcaacatttttcttctgtgcaaaccagaagagtttgtaatagtctactgttctatacccagagcagaggtctgaggcttttgaatgatagttcccagttttcttgacccttttctgtatgaattaccttgttagaataaactgaacatttcccacagactttaagttgcagacttcccagatgaggaaatgctctactagtataaccgcagaacagtgacataagagactggacaaggagtagatgtggttgacttactcacttagtccattccctgttctctcccatatttctacggcctcaaatctctggtgcccgttggaaaggaagtcttgcactctactttgatcaggtgaccagaacctgattctcaccaaagtccttctggtcatgttctgcattaacctttctctcttactttagatgcatagcctgatttatgaaaccgaccctgaatttatctttcccctgaacttcccccaccctatttcctagacctgaaagatcagtccatctgattaaaaccattttattattactactattaccctagcagtgtccctgtctacattctttttttttttttttggcatttggcttagttcttttcaaatcctagcgcggcttggaggcattgccactaggcaatgtacctggactgagtcctgaagttgagcatttactgaatacttatcagcactcagaagcctgagaaaatactacttgagtacactacagtttatactctggaatattttgcactataatgcccagttttggaaagcactaacccacagttgagtcatgtctttgataataagtaacgacccatacctctccaacctgcccgatttctcttttattgactgacatattactttggcagagacctttaggacacctgattttgattctactattgtttctatttaaggtcacaaggcaactttttttttaccctaatcgtatagattcaactcttcagcagtgatattatatatatatatatatatatatatacacacacacacacacacacacacacacacacacacacgtatatatgtacctatatatatatgtaccatatatatatatatggtacatatatatatatggtacatatatatatatatgtatggtttccagtgactagacagaattttattgggaaatgcaataaagtgcaaaaacaaagcggaccctatttcaatctggaaagcagcataagctttttagaaaattccaggtactgtctgagtactgattgattggcctgctgtgggcattactaatagaagcagtttatttctccaaggccctttgaaaaaatgatggaggctacccatgagtatcatctgagaaaatatatatttatgtaccacaatccagggttctggatacttactctactagacataagtccctacttgtattttaagctctgtcctttttctcatctctacctttttctttacaacccatatgggagacatttgaaaatttttctagatgaatttttgctatgatgatctgatgcatttacctctaaaatagttcccaatcccatgcccttcttttcacccacactgaagccttcttagtgtttctcttagaaaattaagaagttgcctgttaggcatgtctgcttttggcctggccttcttccattgctaccaaagtaggtcccaaggagtatatatctaatcgtgtcacttgcttattccaaaccttcaccatggaattaaggccacacccttaggatgacattcaaagcctccaaaattataaccccaatattcctttttttgaatgatctccaccctggcttccccagcctgcacatggacaacatcaggagcagtaggagggcctcatgcagggctattcttcccacaaaagttactgcactaaacagaattgagagagtccctacttttctcacccgttaaatattttggcaagtaatagctcagatccaatggctcagatggccatttatccgtccatctagtcatcagtaaatatttggtgagcagttactctagtgttatgcacttgcaaggagctaagaatatataggtttctaagctgtcttcaagaagcttgtcatgtgataatggtaggagacctgcaaacaggtctgtattattaggtgttaggagaactgcaacacaatctcagtagttaaataggggcacaaactctcttggcatggttaggaaaggttttcaggcatcacatattctcacttataagtgggaggtacacattggataggtacagacacaaagatggcaacaataaacactgagaattacaaaacagaggagggggacaagtgtttaaaaactacctatctggtattatgttcattacttgggtgacaggatcattagaagcccaaacctcagcatcacacaatatacccatgtaacaaacctgcatatgtaccctctgaatctaaaattaaaaagaaaaagaaaaggtttgtgggagaaagagatgtatgaaatacacacacacacacacacacacacacacacacacacaacacacacacacacacgcaccaacaaaaaacaatccacctgatgtttaaggatctcggaaactaaagactgctctattacacttgttctttgatgatagagacagcaataactctaactgctggcattggccacttcgttactaaccctaggataatctgcacatggaggccactgaattgtcatgctgggtatgttttaccagtgagtgattgcagtggctgaaggggatccaggcttctatttaaaacagtgattgtatgtggccccaaatttagtgatagagcctcattcagggttgctgaggaatgtaggaaagggaggaggtcgtgaaagaatattacttcagtttatttaatagttaaattcagagactgggggtaacaacaaaattttaaaaaacaaaattaaagacaaaacacaacaccagagtaggtagaaaataattatcttttccagcatagtcctaattctgtgaaccactcttgcccatagggtaggctcagtgagatgaaatgaaatacactcttgcaggcccgtgaaggaggattctgagcctaacccaattccttgggtgccacgtcttaaatgagattataatagtggtaatatttagtatcacagctctgttccttgccttggtcttaatgatgctgcccagagcttaacctttaatgagtttatttttacttcaggaaaatgtccttgcccagctaattgtgtctttcctaactcgattatatctggtctctcatgggatagcttaaaaagttaaaaacatatccgtggtattgttcatattttttttctgtcggagccagttttcaaaactccacaaagtgagtaaatacaacttaagctctttggaaattccttgtcaggagagtttgaaaaaaaagtgtctttaattgactatgggacatgcaagttcaatttaatttcaaagtgtaatgaagttaagctttgcatgcttttatcttattaatttcttttgggtttgtggttttttttaaaaagtgaagatggaaaaataaaagcttccaagtaatcacttttcttggtgaaatttgagttatggatggcatttgcagtaataccatattaacagaatatgatataccacctgatatacattgaggtgtcctaattcagctgattatttgatcaggctgagaagagaagaagaagtcattccttgcttgcttctaaacacttgcctagttgagaaaaagttggaaggttgaaacacttcctttctggactctcaaatatcacaaaaaactatcatatcagactcaaagatcacttcttccaggaagctttttttctcatcaccacctcataaactaggctggatgatgttcctaggtgttaattttcataacactgtaggtatacatttaacatcagacttagaccattttttgtgtttgtaatgatctgattttatatgtcccctaactctcttatggtgtgatatacttaagggtagaaacaatatcctatttagcttcccattgtcttgtacaggtcatgaaacagagtaggcccctggtggtgactgaatgagcattgcctgcatctccacacatacatcttaattggcagatacttgtgagtgaggcctctgaagagtgttcatttcataattacggcacaggttcaatgatagagcacctgaggtcctatgtcccataattggctatttgtgggtgttatagactgaatgtgttccccctcccaaatacatatgttgaagtcctaacccccaaagtgatggtatttgaagataaggcctctgaggaggttataaatgttaaaggaggtcataagggtgggaccctaatctgatagggctggtgcccttataagaaagaaagagccaccagaggtctctttctcagtcatttgaggacatagcaagagagcagttgtctgcaaaccaggaagagaaccctcactgggaaccaaattggcgggtacctatatcttgtacttgccagcctccagagtatgtgtaaatttaaaccacccagtctgtggtattttattatggcaatttgagctgagtaatgcatggggtaattttattcactgagtgcacttgtagacaggcctctacacagctcattcagtgagttttgatgtaaaaggcatcgatgtgttatatctgagcaggatagcttatatatctcagaacatctaccttagtgttagtgcacgattaccaaccagattgccattgctagatggaggataatacttaacccagccttgtgtatctattgtatttaaagtgtcagtaaagtttataactagagtttctcatttccgtggtcctagttcctgcagaatagatgaaaacatgtaatgagctgtcctgagtgttagccttttctgggatgtacatttggcaagcttgcaatacaatgtaagtgcagtttctggtagaatctctagcgaacacttttggccacactctgggagttctctgtgacaaaatgaactggttagtctggattagtcagtgctgtaaaccagtcaccatgatggtcccttcatgcttcaaaaatcatggaaagagccccagtaaattggagatttcctgtactgcctttacccagaagccacctcttgccagagttcagggccccttactcagaaaatattaaatctgagaaaagattgaagctaggtcattgcaaatcatgaggggtgtaaagtattctgctttgagcccatccctccttgacaaataaaaaacgccaagaaagatgtgcttgatggggccagcatctcaatctagaattcagactttcatagctgaagaatatcaaagccactgtgacctatggagtttatacagcatggggtaaagctgaagtgaagacatgtctagaggttgcaggtgactggccctatcaggagtaaatagaaaccattctgccctttccaaagaaagagagaacagtctgctggttgaaggcaaagcattgttacttttgcaaagaaagttaaacttgccaacgtcattagatgaaaagactatgtgtgtattattctaaccacaaagcaatggcagtgagaggaaggctcctgccagctgcttcagtgagccacagtggcactgatgctctttgagtgggaggtttctgttcatttgcaaatgcgatgacattttcagctttttgtaccaggaacggaagcaccttgggaagcttgtggttgaatgcattctccctagagagcagcaaattaggttaaattcatttactgatggaggctccaggggaagggggaccctggggaggagggggcagatgatgtgtggcagtgacttattctagtttgaattgacttagaaaaaatgtatttatttgcttcctttctccaaccttcatcatttcctccaaagactgcaagcatagacttatacaacatgtcctctttgcagaaagctgtgaggtggttgtgtgctcttgacctgagggagcaggcccagaatcaatgaatgtgtgtgtaattaaactccaggggatgagacacccgacttcatccaaattagagattcaattcaacagcaagtttgataaaaagggaggtcggtagtgaccaaactaaccctgctacgtcgttaacgaggctgaagatgattccaaaatggcttaatgtggcagaagtcttctcacaagatggctatgattcaaataaccttggacagctgtgatggaagagcaaataaatagctccttttacaaaaaaaaaaaactctgtcatctcctctagccaaagatattagagcccagaggaaccttatttggtgctgagtccaccctttcaatttccaaaagagaaaagaactctgataagttaaatgactcccatggaattggagatgtcaactgaagaatgatgaggttcataaatgtggaaacaagagctttatttctcataaagcgttgcaacctgcatggtggccattctgacagactgggaagcatagcctctggccaggagccaaaaacagactcttcaagggaggagaaaagggaacaggagtgtgtgctgaggtggccacatttacatatttagtgagctataagaggagtcataaatatttttaaaaggagaaacacacacattcacaactgagcttcatgattctccaggggacccatgttcaaaatacagccttgttagcgtgacccgagggtggtgttttcagccctctgatgacaaatgtgaagcacaggacacaaaagcccctaatgtacaccctccatagactggccagaaccacttcatagtctgtggtctcttatcaggaagaaatgctggtcagctgttttgttaaaaccacaaaagggaggggcagtcattactggttagttgatatcagtggtagagtctctgtaaagggctggtttctgtttggtccttagggaagaaagcttaatggtgattatcaagggaggggatattacaaggaatgtctgacctcacatactgtcatgactgagaactcaattttcaagattactctgaggtccccttggccaagaggggttctgttcagtcagttggtggatttgggatctcatttttatttctcagaggcttttattaatatgtttctctgtgctttgatgcttatgcctctcactctgtaattctgaacccaaccattgccctataggcggtgtctacaaaccaggggtcatccaacagtaacaataagaatatttccaagtgctgacggaaagagctctagattttttttgtcaactcactagcagatatttgactcactggaagattttctgctgggatagaatatttcacctctctcaatagcggagttttcatctgcaaaataaagcaataaacaactaaccaaaatagtagtactgccatggctaagccacgacagatggcagtgttgcagaaataggaaaaatgttccctctggtggttgaagatgggaaacacaccctttcctctgggctgactttgccctaaggaaggcgactgccttggtgagggactgagtttcattccccaagctttcatccaggcacacttttatagcacacaagctacacactcatatgtgggaactctggtactcaactacctagtactcaagcctcaactacccagggagttaagggagaacataaggaagaacatctacctgtaaaagtacgttgtaagttttagcactccttatcaatgcaagtcctattaagatattgaaagtggaggaatacaggaagatcctttatagcaaaattgggcttggatatctaagttgaaattcattctaccactaagggctttataccaaagtcaaccacatccctagaaatgcagtgtccagctgggtgtggtggctcacgccagtaatcccagcactttgggaggccgaggtgggtggatcacaaggtcaagagatcgacaccatcctggccaacatggtgaaaccccatctctactaacagtacaaaaattagctgggcatggtgatgcgcgcctgtagtgccaactactcaggaggctgaggcaggagaatcccttgaagccaggaggaggaggttgcaggttgcagtgagctgagatgatgccactgcactccagcctggcaacacagcaagactccatctaaaaaaaaaaaaaaaagttgtttccaaaattgaactggattttcaatgagtattttcttgagaaagttccctgaaggatgatcataaaggtctgtatgtcaggatacatcccaaggagaagtgtcattcctcagaggcagtcagagatgactcctgtttgcatggcatgttaagaccttgataatcctgcatacatatgcatacattcttacagtcactgtcccagtgaattataattatttgaataaatatgcatgtaaacatgagttaaaaagctaacttgataattctgttgcttcttaggatggctacataccacaggcaagaaaatgggagagcaaccactgacaagctcatagaaacagggcatgtgatatgtgagtgactggagaatgcaaggagtaactcctgacatgaggactctaatctcatgtatacagacatgaaggtttacaagtctgttgccctcttctctgactctcttctctttaaagaggtgatatttgagcggagacctgggtgatgagaaggagccagccaatgtgccaatctgagtattaaatattccagaaagaggaaatagccagtgaaaaagtccataggcaggtacaaattctgtgtgttttaaaaaagaaatagatttgtatatttggatcttagtgagtgagagagatagtgactatgtatcagaaatgcagatgctccacctacagaaattccaaatcaactagtctagggtggtgcccaggcatcggtgtttgggatttttggttgttgttgctgctgctgttgttgatcttgttgttattttaggttctcccagtaattctaatcacagactaaagataactgatatagagctttatagggtatgggaaaaagtttggcttctaagaactatagaaaaccacaaagaattttaagcaggggagtgatgtgatacaatccatgattaaaatttccctcttgatcctgtgtagaagatggattgaaagaggaaagggtggcaagaatgaggaaaactgtgagtaggcagtggcaaatatccatgaagtcactcttggtctagtggagaaaaaaatggaaggctatgagaaatgttattaaggtgttgtccttcacagctttacctaaaatgtttatttgctgatggattggattagattttggggtatgggaaaagacgaatgaccaacagaattttgatttaagcaactcagtgcattgtggggccacttatagaaacaaaagacactgtggtgtcacatgggtgcacatgggagaagggagtggaaaaaacaattctggttttggcatgttttgttggagatacacacacacacacacacacacacacacacacactggaaatacctacactgtaaatatatatgtgtgtatgtatgtatgtatatacacacacgcactcattatacacacacactccacatatatatacaatatatacatatatacacacacatatacatatatagtgtgtgtatatatatacatatatacacacgtgtatatatatacatatatacacgtgtgtgtatatgtatatatacacgtgtgtatatatgtatatatacacgtgtgtatatatacatatatacacgtgtgtatatatatatacatatatacacacacacatatacatatatatatgtatgagatttccagtgtaggtatctggtcggcaggtacacattgggatattcacattgggaacttaggagagagatcaggtatatgtataaacatttgagtttatatggtatatagatggtatttcatgccataggttgagatttcttcaagagcaaatgtggacatagttttcgggtatggtaatgtttagggcatccaaggcaagtaagcactttttgggtgaattaaaattgagtataaatactctgtgcagaacactcttacactggtattaaaatatctttcctgaaaatgaaaaggaatctgaagtggaagaaaatggaactaaagaatttattatatataattttgctgattgatttttctcttataaaagaaattggatggaaacatatatgagaggggggcaagaataaacttttcaatggcaacacccctatatcatttcatgttatagtagccaaatctaccaaagagaatcattgcaaccattcctgcctcatgtctcttcccaggctggtcctctctgccaggaaatacataggcattttctggtcctagtttccttaaattctgatgcaagcagaaaattgccagttctgttactgagtaattatagccctatatctgaaataacttaatgaggtcttctagcagccttaatgccagacttaataatgaaatgagtcctccaccaacatggccccaaggcaccaagtggccgtggggttggggcttcccagagaatcatgagaaatttctccatcctgcaagtgtatcaataatttacctgccttcccaatcttatatgatctgttaattgattcacctaagtaacagacttcaaatcgggaaacaccacccctggggcaaagtgatgattttctgaagagtacgcagtcagggcttaatttgcagatcttccagttccatctgtactgtttcctaaaattgaactgcctaagaactcatacttcttacgctttttcaaataaagtaagcttgtcagcactgggacactgtctataatgacagtaaaccctgtggtttactgaaaccttccaagtgctaaacaaggggccatttgaaatattagtttaggtgttgagaaaatggataactatcctgattcagtaatcaaatctttctgaaagtcaggttttccagttcttttctttccacaaaattgaaggtagacctcattgacttgtcagttgttggatgactaaaaataatttttgctgatgaatcactgtggttttgatatacaacttggaaaaagtgcaaaaaaaagagtgacaaggctattacaaaacttccattcatgtcaatttatttataagaaaaaatttctcagttgtaagcatttattaaaatgaaaaataggaatgtacttgaggctgaatctcatttatcctagtggttggtcatatttattcatggatacattaagtaattgtgggaggagtagccattcatctcattaaagctgcatgctgaattataattttaaatccagtaatcatcaaaatgtagactataatttattgttttgatcaatgttgtacttaaaattgtaatgaaaactcaatccaaacaaaaatctttaacactttgagttatggaaattttttttggtaaagattactaaagactgcacaataaaacatgttaaagcataaaattgtattgtattaggctaaaattctatgaggaaaataaaatggaaatactgtttgaaggggcaaaaggaaggttacaaaatttgttaaagaaggcaaatttgtatgtttttgtatttgtgtatacaaatcagtggggtttttttctcaaataaatgataggatttaatcactatggcatcaaattatcactcttcaaatgacagctgaggagcacctaactgagctggcaagagaagtcaagaaagagtttcagatgaggtgatgccacagctgagtctcagaagacaagcaggaattcacagggtgaagaaaagaagggcaggatttctagactgagggtgcatctggctttcccaaatagccctcatgaggcttggcctgtatagagaaatttaaatttctcagttagactcctaagaaaggtgcctgttagagccaggcaaggagtgactggcaaacaaaatgagcaattttggggtagggggtatccagacaggtcccaattggcctgcagaacaaagaagcacccctggggaaggtgagctttggctaagcagcttagttaatttttagatgtccctgtgttcctaaaactctgtgacagaaagacttgggtatttactgctttgtgagcacaggagttagcatagtctttcattaaaggtcaaaccaacccagggagaagtatataagtcccatatctggctggcaggaaaaggagacaggaccttgaattttcaaaagtgtgcatatatgaatccaagttggcattatactgccaggctgcctgaaatggataggtagaatgggtaggtggtattagggagaagaaacacgattctccttgatttcctctcctatttcttgtcatccaatgtccactaaatgatctgacaaggggaggtggttagaaggagaatggaattagaggaagaaaacagacatagattgagtgcctacttacatgctttaaacttcagcaccatataatccttgaactcctgggctagatgtagggctccttctttgtgcttctaaggttgcttgtgcagaattctaacttgattttctctattctgcagggattttttttccttgtgtatatgccccctcaaaatcaagactttcttaaaaacagaggttatatattctaacattctggacccctaacacaggacttagcctagtaggcactcaaatgcttaattaactgaattttatttcttcagtggtgttttacattaaatgcctcattgaataatcatagcaaacagtgacatagtgtgcagcatgtactggtattgctttacatgctcactaacctgcataatcctcctaaaaccctgtaaagtggcaactattatgatctcccattaaatagagggacatcaagtgacacaaaggttaaataacttggccatggtttcacaactagtggtagcagagctaaaatttgaaccaaggcagtctagctcccaagtctgtgctttgacttgttgctatatcacattgttcctgccacactactattaggtggatatttataacctcattttgtaaaagaagaatgtgagtctctgagagtacaagggcgtcagtcacccaagacacacagctagtaattgacaggtctgggatttagattcaaacatgtgcagttccatatttactatactctagagcaatgtgtacgtctccagaacaggaaccattatcttaagtattttgactgaggaaagtgaaaggatgtaggatgagtagcctaagatgggtggctggtaaacacccaggaccaggtggaagtttcctttattattagcctcttatgtaaaagtctttctctctctctctctctctctctctgtgtgtgtgtgtgtgtgtgtgtgtgtgtgtctggttgagttctctgaatatcattaatatgtgcacagtgtgaaaattttaagaataaagaaaagaatgtggaaaaaccataattgtcatcattctaccatcccgacataatcattgctaataatttctgttagtattatatatatatgtgtgtatgtataaatataagtaaatttaaattcacagtttatatttgacttttttccacttaacgttatagcctcagaattttctaatttcattaaaaatccttcaactgtgtgatttttaatcgctgcacagtaattggataaatcattatttaatcctaattcccttattattggatatttatcactgtttatatcttagataatttctttagggaaaacatttaaaagtagactggttggatgaaagactttatgcatatagacaaagtgtcctcaagaaaagttgtataaatttactctgccaccaaatctataagtaaattccatctccccaacctttgtcaacattgagtattacctttttaaaatctatcacttaggtacctaaaaaactttcccctcggttttaaaattgtaactcattgattattaaagaggctaaactttttctgttatgctcttcatcatttgtattttttctttttgaaattgtacattcaatatcatttgccatttttttccattcgggtatttttattaattaatcagcatgcataacttctttatttattaagaatatgacttgatctggtaaaaatattttttcaattgtttatttgtcttttgtttttttaaattccaattgctcatttgtctttaaatttgagcagatttttcttgtatatggaggtttaaaaattatgtctgaaaactatgaatttcttttgtaggctcctcatttgcttctaaaatttgaatacctcaaaatcagaatcatatttacctatgttttcttagacttagggttttaatttttatatttaaaaatttggtacattcgccattcattttgaagcatgtatgatacaagtgctaattaatctttttctctcaataattactcaaaaatgatatattggacagtcctttttcctgtggttcttagacaattctctcctagtgttttattgaacaaacatctgcaccacctttataagataaagggcactgtgatatgtcctgtacggtcttcagattcatagtttccagattctgccttccaggaacttatcaccaagtaggggaaagtcaagctaccaaattaactcttacacaagatggaagtaagagagaaggcagacatcttggtaattgcctaaagtttctatcacaagagtgatgaaattgcatggccagttactctcatgtgttactcagagatgcaccacccagatcctccttcaagaaaagttgatgcccagctttaggaagggtgatcatcagagagccttcagccgccagatccatcagggtctgccttggttgcagaacacctcacacaagctctgccctttgcggggcatccagtcagtaaattagtggggctgggatataaaaagccttgtcatgtgggctaacacagagcaattctgacagatcgtatttgctccagagctccccaccaggttggccaagacttcatcaaccccgcattgcagttcatcttctccctctgctgaatcctgttatttctgtttcttccatagatgctaatccctaataaatatctaaccccctaaatctacttcaacatctgcttctgcagaagtcaatctgtgacatccagcatctccctccccatgtattgctctagaccaagttggcaaatcagcccttccaaggtgtctataaaaacttaattctggagacccaggagaaatcttacaaatgactttggtgtaccaggaaatgaactgaagcatgatgggtgcatcaattagcaagtaatttgaatttaaaatgtgtgaagatacaaatagagaggcagaagttcaagtcgataataactgatgtgttcacagaaggtgtgcaggaaaccgtctggcagtcagagagagcatgtgctggtgctaacttctcagaatgtgattgtagaaggatagcatcattccttcatatccaaagagaagactttttattttccccagacaatacaaatatgatttctaaatggttgctgtgtaataacacctaatatttacagagcacactatgggccaagcactgcgccatgtactttttaaggatattctcacttaatcttcatattgtacattatttgtaccattcctattttcttagaaagtttaattatcttgcccaatgtcataaacactggaagtggtggggcaagaatatgtatgtacctcatcagcctaaatactgctttaccctaggtgccttggccactaatcaactgtgtgaccttcaaaagttactctcacttctgcttctcagaaatagacatataagtgtttatctcatggagttatttggatgattacattagaaaaggtaatgtaaagcccctaaaattttatctgtcacaaagtaaattctccacaaatgtcagttgtcaatatcagtgttatttttagatgtcctacatgaatttccatattgtctgaagtatgtttcacttctaataagggatcacacatgaaaagtactcagaaacttccagtcactctggcaaactcatctgacatataaagaactctgtcttccaaacacaaagaaatactagacaacataaatgtataaagtaaacacaaagctgagtttgaaggtaaggcaaggcaattctcggtgccagaaatgaagaagaggaacaaagccagatttctgggcagaagctattgatgaccagatcataaagctataagatctaattattagccctcagacctggagagctggtgctttaaccaatgcctaccttcatgtaaaacaagagaagaggctttgggccttgcggttaagcccctccatagatatggaagttaccctgattagagaatgaagaaaggaacctggcaaagaaagcatcatgaaagctggtcatatatgggagtacttaacatagttctgatttatactatctgaatacgcaaaggcccaaatcaagataacaatatataaaacatgtatcctagaacttatggcttccttaaggtcttggcagaagcaaacataaaacccatgcattagggacacctccaaaccctgagcacccagactcacaagaaatacaattcctgctgaagatgatctcacagacaaaatgacaaaacaccagggaataagccaccatgagagagagagagagagagagagagagaaagagagaaagagagagagagagtgctggcagatgtaacaaactgtcacatttttacccgaagaacaagaagtaataagacaatctgaaattaaaggaagtattttcaaaacatacactaagtcaagaggagagaaacaataagaaaaaaaataagaaagaatggaaatagcagctctggagattgggggagccatggagtaaaggactgggagaaaccaagtggtcatggcgtcacagtaggcctcatggggaaggtgaaaaataagcagaaacatgaaggaggtgagggaggtaatgaagccggtatctggaagaagagagttgcaggtgttggaaacaaaggaagccttcaaggcaggactatagcttgtatgtttgaggatagcaaagagggcaggatagctgaagagtgtgaccaaggagaagagttaaattacttaatctccctaagcctcagtttactcagctataaagtggggaatatgtacttctcagaattgcaaggattaaataatttaagcaaaggagccatgtctatgggacagtactggtctggatcctttatgtctgctatgtcctcacaccaagcctctgagttaggtcttaatatctccattctacacatatagacacagaggctccaagaagttaaagatattgaccacaaaaatagtgagaggtgcaactgggatttagacacaagcccatttgtctctaaatcccaagttctttctacagtcttcatgtgaaatagccaaatgcagtgatgggtatatagtaggagattggttgcaataattccattttttaattaacttgaaccagatatatcagtaatagattctgtcttagttttggtgcccctcaaagtagagcctaaggcaaatattagaatataggtatgttatttgaggggtgatgtcagaaagcaagaattaagaaatggggaaagtgagacagggaagaaaataaaaaagattgtggaagactgttactactatgggcatctgaagcccaatcccactggagactttttgaggagctatgtagaatgcacctcagaattttccctcccaaggcagagatgctcagacgttaacccttcagtttttgaatctcatgggttcagggttacccctcaatgtgataattcacccacacttgcaggctgcctcctacatgaattctcatagtgtcagagaaaattcagaggctgagaagcaaagagatgcaaaggcttatggctgtctgccacagttgcggcagaaatcagaggtgggttggggcagaagtgagggtgctataaattattctattttatattaggtaccagtgcaggaaccaaagagaaggaatcacctacagacctatactgatttactaagaggaaaattttataatagtcagaaacactcaaagatagaacaaagggctaggaagtaatatcgccctgcatagaaagtgccaagcagggaggcttattggtcaggaactcaatcattggtcagacaggtggaccagttagcttttaggaacattccaaccctgagagtctatgacattgtttattaaatatacactatttgtcgtaaaatgtcagcacaagtgagagttaaaaaccttaaaactatattgtatatttgctgagcaaaatttctctgagaagttcaaattactttcctatggtgtcagaactttgggacttctcaccgtacttcagctaaataaatcatcctggaaaacctgaaatagaatctgacttctgttgttccctgggcagtctgtggtgtagatcactggactcagctctcttgtcctttgaccagaatgtctggtcagtatggataagcaataggagatgaccttgctgaattacattagcttgctttccatcacagctttgcccctttttcctgtccccaagcaataggtttaagagcacagtttttgaagtcagatggtgctggctttgactgaagcacaaaatgaacttaataagaggatatcaatataccccagtgaacttaggagaactggagaatcaggcttgaaccatacaaccaggctgcaaaaatggtatcacaaaaaaaaatcaaagtcactaagcattagacactaaggcttccatcattgccagttctgtgctgggaatttcattttgtgacaattactactgccaccacctccagagaaaaagctctactttaacctaagtcaaaatccagcccaggtcatctgatggcagaacccaagtgttacaactgctttaaccttcaatagaggctggaaaatcccccatcaagatttataggtaactaacacagaaggggagctcagacatggatggccaaaactgatgcccattattcactactaggcctatctcatagggtggttgagaagatcagatatgatattgtaagcactaaaaattagtacttgcttattatagtggaggttccaggctttatcttaagaggacatagggattagaggaaaagccaaaatgcttattccaaggcttgcatttgtcgttttaatttttatcagcattagtgaaatggtttctttcttctttttatgggtactcacactgatgacattgccatcattgaagatggctggagctaagctgtacacaaaatcattgtggttttctctcccagccaggattcttaaaccatgataagcagattgtctccttgacaactataactgagcccctctcaagagttggccacaaggttcttgcttattactgcctacttatctaaggtcagcagcatggggccaaacacctggcagcctccaagccaggaggtgcatatgtctcataaaatctatgaggactcacttcactgagaagagatggattttatcattttcttttatggaaaagtttagcattgcataaaatcacaagagcagaaaatacgattttctacatctgcagaaaatggtagatgtacatttctattcatcatcattccctatgaaggaaacctaaatctctgcccttctgttgccattttttcaccatatattatattccctagtagaacattttaaatctagtgcctaattccagaaatcatgtagagcctctttgaaataagattaatcttctcaagataactaggagcaatgtactttactgtgtatgtgtgtgtgtatgcatgtgtgtgcatgtgtgtgtgtgtattactttaaatcgatgaaataaacggaactgaatttatatatgtctaaagtgcatcacatgtgcaaaggtaagaaattattaaattcttcaataaaattctaaagtgttcataacatatgacctgctagtgaacattaaatgtttgaatagagatgagacagtaatagtaaataaaaaatcttttgcattggctgtttcctttcactaagacattatatttttattttgaattttagaaactgtcatcttcagaattggccaaattgattattctctttacatgctacaaagcttgacctccttggttggaagtccttagagttttgaagatacttaagagcatattgaatggaagaaacaaagaaaggcagaaatataaaagtagtggtatttttaaaatacatgtaaccattccaaagcactttcttattaattatctcatattctcacgttctcattcattcattcactcactcaagcatttaacagacaactcttgagcaccctctctgtgccaaaatcagcagtagacacttagaggtggcaatcagaaaagcccatcactgtttcaagaaattgtcacagtagggcctgggtggtgaggtttttgtgtgtgctccaaataacaaggaaaataagacaaaaaatgtgaagccacttactcaaggaaacaagtcattagtatctgacagggctgaaacattaactaagctttctggcttaaattagaaaccccaaagtttgtaagatagtgtatttaatacaggtctcactggcatataaacccaaaatactgatttttgagccaatgagtttacacttttgtggcctcacccaatgggtgtttttctttgacttcatccaacttgagtttgaactcgtctacatatcttagctgcaaacactaaatttcagtcatatttcaatcttttatttagaaggagactatacatcactctgctactgagattctgaatggccttcacatatttattgttcatttattatttgttcattcctggtttcttcattttaaatattcaaatgactggaataaaatttgaagcattaattctgataaacacaagatgggggccagatttatgccatcatcatctttatgaaaggcaggacagtaatgtgtcttgcaacaggttttctgctcttttagtatatttattcctgaaaactgcctggttccagccatagctagaccgttagtgtaaaataccaggggaaatgtcttcgctgctcactcagaaactttgtttgagttcttggtagagtgggaccaaagttagacccaattttattttatccatacccgggtttactgacaggcagaaatgaattgatttgcgggaattttttttttgtcacagccacctcattaaaacatttagccaggttcattcatggaactttgaggagatgcctgagcaaactggttttcaccatggccaaggttcatgaccacctctacttccagaccttcactgtcctcctgtccagccacacggacctcaagctgtgctctaggtgctgtttccatatctccccctatggatctgctgacaggtttagcttttccagtttgccctttggtgctgtcttttttttctttccaacttctattttaggttcaagaggtacgtgtgcaggtttgttacatgggtaaatcacatgtcatgggggtttggacatttgacaaaatgtacaggtaattttgtcactcaggcaatcaacataacacccaataggtagttttcaatcctcatcttcctcccaccctccactctcaaataagccccagtgtctatttttcctctctttgcgtctgtgtgttctcagtgtttagctcccacttataagtgaagtatttggttttctgttcctgcattaatttgcttcggataacggcctccagctccatccatgttactgcaaaggccatgatctttttatttttatggctgtgtagtattccatggtgtgtatgtaccatattttctttacccagtccaccactgatgggcatatagattgattccatgtctttgctattgtgaatagtaccacaatgaacaagcatgcatgtgtctttatgatagaacaatttatattactttgagtatatacccagtaataggattgctaggttgaaaagtcgttctattttaagttctttgagaaatatccagactgctttcaacagtgactgaactaatttacattcttgccagcagtgtataagtgttcctttcttctacaaccttgccagcatctgttattttttgactttttaataatagctattctgactgatgtgagatgatatctcattgtgtttttgatttgcattcccctaatgattagtgatattgagcattttttcatatgcctgttagctgcatgtatgttttattttgagaagtgtttgttcatgtcctttgcccattttttaatgcaggttgttttttcttgttgacttaagtttcttatagattctggatattagacctttgtcagatacatagtttgcaaatattttctcccattttataggttatctgtttatgctatccatagtttctttgttgtacagaagttctttagtttaattatgtcccacttatcaattgttgtggggtttttttgtgattgcttttggagtttttgtcatgaagtctttgtccaagtcaatgtccagaatggatttcctaggttttcttctagggcttttatggttttagatttttacatttaagtctttgatccatcttgagttgatttttatatatggtgacaggtaagggtccagtttcaatcttctgcatatgggtagccagttattccacaaccatttattgaataggaagttctttccccattgcttgctattgttggctttgttgacaatgacatggttgtaggtgtatggctttatttctgagttctctaacctgttctattggtctatgtgtcttttttttctacgagtaccatgccattttagttactgtagctttgcagtattgtttgaagttgggtagggtgatgcctccagttttgttctttttgcttaggattgatttggctattcaggttctttttggttccaaatgaattttagatttttttaaatctaattctgtgaaaaatgttggtagtttgataggaataacattgaatctgtaaattgtttcaggcagtttggtcattttaacaatattaattcttcctatccatgaatgtggaatatttttccatttgtttgtgtagtctctgatttctttcagcagtgttttataattctcagtgtagagatttttacctccctcgttagctgtattcctaggtattttattctttttgtggctattgtgaatgggattgcattcttgttttggctctcagctttgatgttattggtgtacagaaatgctactgatttgtttacattgattctgtatcataaaactttgttgaagttgtttattagatctagaaacctttcagcagagactgtgaggtttttctaggtatagtatcatatagtatgggaagagagatagtttgacttcctctcttccaatttggatgccctttctttctcttgcctgattactctgtctaggacttccaggattatgttgaataggagtggcagcaccggttttgtattaccctacagttctgtaactgcgagcctatccccctgggctgtattctcattcctgagagaaaaggtaagacaggaaggaaagagtttctaccctgttcacagtgtctgggctacccttggaattttcccagcttgctctttggcacactctccaaaagaaacaaagtttctgatctgtcacatagtagagttgaaacaaaaacacagactatggagggagtaggtaaagtctaccatttataccctctactttatgccagaagctgtattttacatgtgtttcctgtggtggtaatgatgataattcccactctacagatgaggaagctgaggttaaaggaggatttatgacttgcccaatgtcacatcacttgtaagtgccagacaagaatttgaaccttactccaaatctatactctctccaggacaggctgcttctccaagactcgagctagacatacgctcctgggaagggtacacgataggaggaggggcagtggtacccatggagtgggtcaggcaaggagctggccttgagaatgtgcatgcagtatgagtcagtgcagtgttctaagggcagaagaatagaaataggcaatgcaaggagttccaatggacaaaaagaaacctgtcattgatttccagggaacaggcttgatgttggagttcagagtcgaatgctaatcttggaggacaagggcaagaccaaggcaggcttcctgtgcaaacagcagtttgtaaaaatggagaatacagtcaccagggagcaaagcacagtcctgctgggagactatgttttgacaactgggtcagaatcatacagaatcagtgtgagtctcctacctgatgccagagctgtgaaattccctcaacatatcttcattaaccaacagctgcaataaaggggagtatttcacctccaggcctgctcaagagatctccatgtggttcctttcagccacatccaagaataggtgctggctgctttccattgtacatccttaccactcctacattcataaggtccactcttggtcatggggagcttaagattcttttgaaatattcaaagtgtagtgccaataaagtgtaataccaatgggattataaaagtcttgggatatatattgagtctctatggctgctattgatgagacaaccgcccaaagaaagcagtcaccatacatcctgatgaacagggctccctagaaaggcacttagtcttctcctgggatcctctgagcttctttctccaatgtgatcatcctccagcaggacaacctcatctaccctttgggtaggtattcctattctttagccattcctccccacatctacttataatatgctttgtttttgttatttgaaattcctgaattcttgaaactaaaaaaaaaaaaaaaaccttgaaatgctattttctctgattcaaaatcaccttaaaaattcaaagctgaacatatctcacatccctttctgtctgcatttatacagttatagccctgctttagggcagagtgcattgaaagcttttcctggtttatgagtactcaggagaggttaggttcaaatcaatacaagggaaagatacgtgagttactataatatcacctccactttaaccataagataacgcccctttcaggaagattaatgtgtgctgtttagattgcatcttgaatgaggcgaaatctgtgtgtgggttatagtccaatggctgtacctttgagagcaagaggaccatgcatctccagctagaaaatgtgaaaatacagcagccactagccaacttccctgagctactagggcacaggagtagcagtaactgatatataacgtaatgaattgccctgtcataccttaattcaatctatatatacttgcttcaatgtgcttcttaatgtttgccaggtctccctaaatatccatgtggcagagggaggatgaggaagggagttattttctccctaaagagaggtccttaatcaactatcagctcttgatgaacaaaaggcattgtccaacaagatgcaataaatgttttgtattaggcgaggcagccccatttttgatggtttgggggaaaatactggttttggagatgctgattgtttccaatctaagcagttttgttcagtgttttccccaaattgtcatctgctttatcgctaggggtattattctcacttggcctcagtacatcagtttgaagctgactggaacagttttgtctgaaataaagttcccacaatcacactctcttcttatcccttgtgggtggtgacaggatgccaaggtgaatgttcaacaaagatgccatcagcctcctctctctgaatgctctgatttctcaaagcctcccatcagggtgttggaagttcctcagacagtgaaaggaatataggtcctggactcaaattggaatcctgttctgccatttgctatcagtgaaactctgtttcttgaaatccttgagccttggcttcctgacctatgagaagggacacaatcttactgaaggaggtattgacatcaggtccataacaaatatattgataggtgatataccaccaccaactgagtaagatgcttcattggtttgagaggcttactggaaaactcgtgagaagttgggatgggagtgagagaatgaccaagtcagaagatactccagggtaagccgggaaggagagaagaggtaaatgtgaaaaaggatattcaagcctgaaagaggacacctgggcccagagcctgaatgtgagagtaactgtttgtctgctgcttcacaattatccacctctggatcacatttgtgcatgagggcttaggaagccaggggcctctttaaactggtgcatttcttgtgcctttatcttcatgatgtgctttgccctctaaggcttctcttatcagcacattgtggttttctgccaaatgcagagaaaccatgacatttgcactgtttcctttgtctttgagttttgaagcctggtatattagtctgttttcatgctgctgataaagacatacccaagactgggcaatctacaaaagaaacaggtttaatgcactcacagttctatgtggctagcaaggcctcacaatcatggcagaaggtgaaaggcacatttcacatggtggcagacaagagaagagaacttgtgcggggaaactcccctttataaaaccatcagatctcatgagacttactcactatcacaagaaaagcatgggaaagaccagcccccatgattcaattacctcccactgtgtccctcccataacacatgggaattgggaattgtgggagctacaattcaagatgagatttgggtggggacacagccaaaccatattacctatcccctttctctttctctagcatcttttggacatttattgtgtaccaactaaaattctaccccaccaaagatgttaatttcctggaacaaaagaaaatgataactgaaacatgtctcaaaaaaagtcaaaagttttaaagaatttatgctttgggctgtcacaatatattcaaattctactgcctcatagccccagacacttctctccttttcttccctccttctgtaggacccagggccatttcacagggccttctttggaggtgaaaaaaggaaaagacaaaaattttttaaagctagaatagaaagaagctgattgggttatttaatttactagccttggggaaagagatctaggtaagaaagaagaaattagaccagatcagttaaaagacagtttctgaactgctcttgggttttgttttccctccctgtttgctttatctcttatcagccaaaataattgaggcaaatgttaggccaagattttaagagaggccctcacaagtaaaagaaactgctgtttaacagttggcttgaaaaaagacaattttcaaagaggctacatagtgtggtgctataattttagattagttgtaatcaggagaagcattttaagaacaatatctagtttagaacttctgtgtattgcagcagagatagtggacgagaggcagggaagtgaaaggcagcaaagggtctccccagcttagctttcctctagttcttggtagaagaccctgaagcaccaaagagaaggactgcaagggacatcatattgcattgtcttggtaattttgtgagcttcatgatcagtcaggcctgggtttaaatttcctctctgttattctgccagttagaatgcttttgattgcaagtaacagattatgcaactatttattgataaaattatgaatattactgtgaacccaggttctttcatacttttgctccttcatttaaagcatgttggttttcacattcaggctggtctaaccttatagtaagatggtggccactgcacaagacattatgtcctcactctcctgtgtctacaagaaagaggtccttttttttttttcttaccgtttttttcagcgtagaaaatatattgcagaattccctcagcaggcttcccctgctgtatttttggctggaactagatagagcctcatctctaaatcagtcactgacaaaaggccatttggggttttaactaatcatggttcatctctgggtaggtccccagcttctatgaggaccctgcctgctggaagaagctggagttctgttagcaaggaagaagtgagtaatgactattgaacaggcaatcaagtgtctaataatcctaagcctcagtttccttaatgaaatagtctcaaaatatatgttttaaaacattaggcacaaagatatgtatcaccctgctatcttaaaagagcagacatttggatggcactgaaaatgtccagcaataggaaatggttaagtaagtttggttaagaaacttaatacagtattaagtaaccatttaaaatatttgtaaagagttttcttaacaggttaaaatgtttacagtagcacatgatgtagaaaaacaggatgcgagatttcacagttattaaaaatcaagacccaaacaagatgctttggataggggatttttaaaaaatagatgatacaaaagatatcaaaattctatagtggctatatgtgcataattagatcacaggtgattttttttttcatttaagtcttatttaaatcttccttggccaggagcagtggctcacgcttgtaatcccagcactctgggagaccaaggcaggcggatctcttgagatcaggagttcgagaccagcctgaccaacatggcaaaagcctgtctgtactaaaaatacaaaaattagccgggcatggtggcacacacctgtggtcccaactacttgggaggctgaggcaggagaatcgcttgaacccaggaggcagagtgtgaagtgagctgagatcacaccactgcattccagcctgggtgacagagcaaaactctatctcaaataaataaataataaataaaacttcattaataatcacatattgttttatcattttaaaaacaaacattaatttgtacatttattaaaataaaacaggtatgtccttgctgatggcagctaaatctttccttaaatcccttatattcctctctacaaatatgaaaatgctggcctaacaaaccgtggctagtttttctttattatactacctcatttggcaggctacgagattccaaattgagagtcaacggtgttttgcctatgctggattttatgacattctgtattgcctaatatgtactagatacccagtaaagtgcttaactaattctatccctttgtcatctacccaagtgttagttcagtccaaaagagtcaatacattctaaaaaggtttaaatagatttttggattcgtgatcacttcctagttcttaaagaaacactgtctcccatgggtgtctgttaatgctgtatacaggcagcaagcacatcagcccaggggcacttcagtaaacagggctcactgggcagctctatgtccaggctttccccaggcacattcatgatgtagtctataaatcataagctctcagaaggggcaaaacaccaacagaaacacaaatggaagaaatgtgctaatattaaatgacatgctgtgagatctggggtagataaacatctcaccccactgcactcattttttccaattgacggagcgttaccaggccatctgtatttcacaaatctgagtagaaacacaggtgacttcacatcagtaatttatgcttcagaggaaattatggcttcttacacttctggctctctgataagtcagctcgaggagatgcatatagggattctgatactatcaagaatccctaagtgaaactcccttgcatgtgactaatgtggagatgctgcctcatagctcacacattctgtacacactgtctgacagaggttttctatcatcacatttactgtggcaacactcttgagatctcactctgtagttccttactaataccaattaatggttataataaaatttattgaatctgtttattcatttaacatggatttttttcaacatctgctatatgctaggcactttcttggcatggtgtaggtatgggctaagtagccttctcttctttgtcattccttcctctcagtggcactgaagatggtgcagccaagccttgtgatgctgccacctataacagcccaactcctgctttgaggaatgataaaactgttaaacctcctgggacatctccctccacgaacttcactgtagcctcactccgttcattgcctgttcatttgcgaatggatactgagtgctgtgatggctcagaaaagagccataactctcttaaaattaattgaactcagtgtaaatgtatgggcaaaaatgactgtatctggaaatgtgtgtgtgctcaaacaaacaaacaaaaaaaattaaaaacccagctccaacctctaactgtgtagcaggagtctgacatggaaccaggagcacatgaagccattttcagatagtatcaacctaatcagaatggggattttgaaaaatcaatgtggattctgcatccaaatttccttgtcactggctgtcttaatctgtttgtgtgttgctataaaggaatacctgaggctgggtaacttacaaagaaaacaggtttatttggttcatggttctacaggttgcacaagaagaatggcaccagtatctgcttctggtgaggtctcaggctgcttccatttatggtggaagacaaaggggactgggtgtgtgcaaatcatatggcgagagaagaagcaagaggggagaggggaggtgccaggccttttaacaatcagctcttatgggaagttacagagtagcaactctattactcacccctcacccttcacccaaaatgggcattaatctatccatgagggatctgaccccatgaccaaaacacctcacattaggtcccaccctcaacattcggatcgagtttcaacatgaggtttggagggtcaaacataccaactataacagtgacaaaacaaaacagaacaaaacaaaatgctgtatgggtgacaaagcgagactccatctaaaacaaatagaaacaaaataaaattttaaagattttttattgtttcttcaacatctattgatcgagcatctattatgtttcagtctcttcaccagatactgaggatatagcattaaagaagtcagacgtgcttcttactttcatggagcttaaacttggtgagagagaaactttaacaaataggcatatataaatatgaaactataatcaagataaggactatcatggtcatcagacactgcttttagccatgacttttataaacaaattttcatgtcttctggcttgatcaataaaatgaaatatccaacttttgaaaagatatgtaatgtctccatatttttcaggcacacaactctagcacatagcttttgagtgatgtgaagtctttagaagtttagattcagggatccaagtcatgacatttaacccagtgagataggtaagtcagggaggtttccaaagatgagaatttttggtggcaaaaccacagtataaactggaccttaggtggcagaaatctcagaatatcaactttagaaattgcctttgcaggcttacagacaagcaggtggttataagcactgagtgaaggatcccagccctccttaagctatcccagaccttcactctggcctctagaagagtgcccccataacaccctggcctcctggagcttcctctaggtcttggccctcttgttgctggctccaccttgtctcccctggttgctagctccacctatctctgatgagagctcccctgcagctcgtctgcctcactgaatttgtggagtgatgaagttctaccccgctttgcggggagaaagggaagtcactatacccgcaattagacaggaagtacaacttcagtatttcttggccttccttccctcctctctaaccttaagcttttattgaaggcagtgatggttattgttggttgtcttctcagaaggggtgtctgtctcctgatttattcttttctttaaaatgtggagtaaattccaggacaacaggaaaagctcccttcaaaatcctttcacatttgcaatacactaacgcaaaaatagaaagtcaacaattgcttgtgaagacatgttgggtgagtgagtgtgcagaatacattttgtgctgtgaaaacaaacaaaagacacacagacacacaaaaactcctatatatggaaatgacagaacttgaggtcgtttcaaggttgaggttcttgcttttttactgaagtgaatgcatcaagaactgtgcaaactcatcttgagtgttttggggcccagaacaagagtagtttaattctgagaataaattgaagctttaattttatcccattagccaaaaaaatgtagataagagaaaataagttatgttcttctcataatacagctcctattatttgacttatagcgggctatttcaaaggtgggatagacaaaaaatcactcatagttcaacccaaaataaaggagggaagaagctctttccttccactaacagttgcaatgtaaattttaagaccagcaaaactgttcttccaggaaggataggcaggagaaagtaagcaaataggaatgaagaaagaggttttctgaacatacacacagtattgcttgtccttttagttgttccatcaccacttgttgaaggtagcattttatcctcgcctcctatacaggttatcatcactgcggcttgaagtgtcaggtaatcatttttttctggacataactcacatctaagctcctttctaacttataagaaaatgcttgaatctttccttttcagcacagaccaatcagctggtagccatcttgtctgcaaaagtagctgttaggtttaatacagttaaatcttcactcaaacatacaccttcatttacagatggccatgtctcatagtttttcagaggaagggaaccgggcacttgagttttcttcacatcttcccagaaccttgagagaaacaaccaccagtagtatttcttaatttcacttgtatagcaaattgattttagagcttcccaaccccatccctgagcttgccctctgatgaatgaagtgtattcaaggagaggaacagtgaaataaataagttatctcacctaacactagggaatccataagcaagggaaaactgcatgggcaataaaatataggtttttctgacagcacgaatggatgaacccaagctggaatgaggtcaaggcttgcagacatttgttgtaacttcacatcctcgtgccagatgtggattataatataattacaattggctctgcctagttctcaggcctattaaatatttaaaacatctttttctagcatatataagatgcaaagaacttagaattttccttcagtaagcaaatcactttaagagagttggaggtagcctttctctggaatcatggcctagtttggggcttgagtttctttccaggggactcattcagtattcatgtccaatctggttgcatggcagggaagtgtggcattgagtttgtggtgcagaggataaaaaaacaaggcaaaatcatccatgacagcagaaggaaataaattcaattttttcaaaatctttcaacagctgatcagagggagccattcccatcctgcttgagatgaagctgtttagcagacatcccccaggactcttctgattaaagcagtttttgcatagtgttagccaaaatctcagccagttcaaagtcctttaagtactacactttcttaaaattgaaagattctatctgataccaaaacagcactggatggaaagaaaagatcaacatgaagggcatttacacaaaggaggattctgattcaatttctgtcccaatggatagattcattctgggctcaggatattacattgccgatagaatattttttcaagtctctgctgtatgcagtttagcttgtcgagtggtctgttttcatttccacttctccatgcaacaaaagaaattgaaattcctgggctctgacagctttctgggctgccttagtgacctatacaagctgtcagaagtcacgaccagctctagaatgagtgggtgcaaatgttcccgaaaaccagctcttggttttctgcagaaatggtgggaacaagagagcattgacacttctgatatgtgaaaaactgtctaagcctgattacaatcctaaatctcagcctcctcttccactaggtatttggattccagatatactagtcagtggctgcattgagctactttttataatctctatgttactcttaactagacttgagtggaaaaatgaagtggcaaaacatcagaaaagcctaagacccagacagtccagaaattggatacttggtttccaaatagaataccagggtgtaggctctgtgtggtaagggtacttggctttatggatgcaaacactcaaaatgtgtttttcctaaaaaataaataaataaataaataaataaatatataatctgagtgtgaatgtttggggtagcagggatttggggaactgaaaagaaatctttctggctcaaagttatccttatggtaagcagattgggtctgaagctattgttttgaagaaatattcactgaagcagcagaggaaaaaattgtggctggggctttttttcctttcaggtatgatgaagcatgaacagtgtcctctccttgcccaaagggaaaaggggtcattatttccccagcctctcaactgtgccctagtcaggccgaagggagccaactgggctattaatatgaaaagatgccactcacagtgttcaggcaggtcctgcccttctttattgagtcctgcatgttttgtaatcaatctgaactggttttcttcagttttctgtaaagggccacctctaaatagatgtctcaatatggtttgtccctcctagatagagggcaaaccaagtgatgaaagatcttttcctaaatatctaaatacagtacacacacacacacacacacacgctcacacttagcaccttccacactgtgtgcctttactatcccttaattagagtgtcataggtaagttacaggcaaaaaaatcaaagtcaaagagagagagagaaagagactttttcccttccttgcacacatatattaatgcctacgtttagatttcaacgtttctgttatgatttattgtggatacaacattaacaggcatccacataaggagaaaaaaattacttaaaaccctgcttcaacaacaaatctaactgttttcgttttttctattcctttcctgtctccatcccaatgttagcaacatgttatttgccatttatctttgagtttacagcagcattgcttgtgatgagcatcactgatttattagcagatgttcaggatgaaaaaatgaaacactaaatatgattgtaaaatgtattatgaacagatgaacaaaactgtgaaaactgtgcatcttagaactgagggagcatgtgacttgcgatttcattacatatatgatttttatctgttttttttctaatataacgagcattttgtacggctgtatccagtttttagaattctaatttttataacatcaaattgtgttatcaagagacatcatattggacattctactttggcaaatatttaatcctcttcctagtgctgtgcttgagctggctggtaccagcttttgggagccaattgtgcccatctcttccctattctgagttcagtgacttcaaattggtagccggaaattggctatgatacaggtatttacaccttgaaaattggcaaatgctacaaacttaccagcaccacactatctatttctgttataaataataccataatgacatctttgactaagcctctcagtgtttttcccttctggtacctggaagaattccaccacggggataattataaagaagtaataaacaaaagctaacacttcttgagtacttgtaaaacactttgcttaatcttcaaaacaaccctacaaactaggtattattatttgtaatttcattttacagatgagaaaactgaggcttagagtattggacaaaactcaagtagcttggccaaagccacacagctaatgagtggcaggccagagtctgaaatgcaggcaatctggtgccggaggttatcccttgaaccacagtgcagtcagaaacattcccaggactctagctctgagcaccaacaaatggaccttctgattccccaacctatcaatttcaaggcccaccttccctgtcatagcccagtagaattcttatattctgcctggtcaccctgatacttgacagtataaagctgctagtgccagatccacttaggatgtccattgtctttcttgcaccatttggtcccaatagtcagtaagttgaagcttccccttcctcatatgtcttcagccctccttcatcataagtttttccttgcagccttcttggtgatgtagcgatccttcacagggttctagatttgcctcagcttcagcgatgtcacttccatcaacacatagatttctgtctttcaaattcattttttgttccttaatctgagagaagttaactactgcctctctcaaagaccaccagaaaacctattgatcaagcaaagatgattagactatagtaaaggaccttgacagagtcctcatagtgtctaagatgggggaagtgaagggagaatctttaaagggttttagggtctgggctaggtaatttaaggcaggttttacaagacagagaactggttgggactgggaagaatttatgatgtaacagcttttgactggtgggcacagtaaggtgagtggcctaaagcaattcttgataagcaacgccattagtcttcataaataagctgttaggttgtctcatggtctcatcttccaaatacaaatatagtatttcttagattaattaactaaattacttctggttgttcccagtaagtttagcacagaaagaaatgcttggttccagcattgcttatcacagagagggaagcatgatattttcagttcccaggaagaagagagtttttccactaatgcttatgagttcccaaacaggaaggaagccttgatccctttgcttctcataacaatcctaatgtcacgattcttttatgtggtttactctttccactattcacaggccctcatgctagaagcttgaaccaagtctccttgaagggaagataataccagtgacaacacaaggcatcatacacctcctttaggagttgctgcctcctaaaatccactggtatcctggatttagatctattctacacttttctgagggccttttctggatggagtgacacccaggtcattgacaggaggtctttgttaaacaatctcagagctcttcaatgtgtctagtcactgtttttcctcataagcctgttgggaagatgtagaaatagaaaccctggtagcctgtccagactcttagggttctaccagtaaatacacaaattaaatatttcagtcatatatttcttgctaaatggacaaagcagtcttcttcttttgagttgtgatcatagggtaatttccagaagcaggaccatggggtaacaggaagtgaacattttcatagttcttaatttacactgccacattactttctatagaggagtgtaacaatgtatactgctagcaggaatgtgggaatgtacaattttcaccacagtatagctagcaatagattttatgttatatatgttacaatttagttataatattatttttcatattcagacttccaattgtttcatttctaaggggcttaacatttgaatataatttcttcataacaataattagaactaagagataagcaaaaagaaaatttcagaagcaggtaaagatgtcaccccaaaataactactgttattagtttgaaatatcttgatagacctttaaggtttctttttatggctatattctcttttttttttcctataaaacagggtcacactgttcatcctattttataacctgcttttttttgctcactcacccacctgcatattttgagcatttttccacaaaaatattccattgttgtgagataacataaatagagtttgagaacactgagtttggagtccaattgctgggttcaaatgcctggtcagacatttagcagccatgggactttgggcaagttattaaatccttgtggctcagttcactcaccagtgaaataggaatcataaaagtattgcctcatagggttgttatgaggattaaattaaaattttaaatgcttagagaccctggcacataggatgcaccctgtaagtgtttgctaaaaacaatattggatgcaccataattatttaatcaaagtcatattattggatatttctgttttattttccttatattacagaaaattctgctttagacatttcttaaaataaatttctaagtattaagttgcttgatcaaagaacatacacagtgttaaggcttttgttatatattgttgaattttcctccaaaaaatatatcccctacacagtgtaggagaatactatttattccttgatgttagcaaccaatttcctttcagtcctttgccttcctgagacaggtgaaatctgggaggtaaacctgatctgattagagagccagaagcacaatttcctgtgacctctttgttctgtccatcataatctcctcattagctagcctaggacttcatctatgccagggaacattagccacttatgtgctatgttaaagtgaaaaatgataactggtaatattgcattgaggactatcattaacttgagctaaattacactgcgacgtctccagaaacacatggaagatttggaggaagaataacctaagttattataagtacacaatagcagtagacaggtttatcataatgcacactcatgaagggtacactgcagatcagctgcatcaaacgaagactacttgaatgtggcagctgtgattcatgttatctcagttattaagtcagttgctaaatcacattcatcataagactttattacttgtccgatttgaaaaggaaaagctcattgtgcaagaggataaaatgcttgctgctttatcataattaaagacacctgcatcaactcagaacttcttgggggaaatataaattactatatctggaaggtatcctagatggtcatatcctgtatagaaaagattgtttttttgttttcctaaaagaaattattttgtggtatatgtattctttcctgccttatctccttccccatgggaatctcagtggggttggtctagttacttttgtgtatgtggcttttttttttctgtcgtagcatgtataagctttaattgcaatattggaaaaaaaaccataataaacctttgctgacactcatgatattcataaaaatatcatgatatccgtaaaataatgatgctatctataaaataatgatgatatctgtaaaagtaatgatattcttttatgttgctatccaggcttcctgcagaaagcagtgaaattttacatagcaaacctttctatttcaaggggcagttatagaattcttacttaatattgctcagatgtcagctctctcctattctggttaccctttttcagctcagtcagatataaattccatgaatctacgttttttttctctcacattcactgttctatcttcagcaatgagaatgatatgcggtatacagtaggcactccataaatagatattgagagaatcaatggatgaacaagcaaatgaataacacttggtaagttaatcactatgaccctcagtttcttcatccacaaaatgggaataaaactacctgcattctagggcttttgtgaggattggatgaagtctggtatatcaaacatttaatatacaacttggcaaatagtagctattaatttgagtgaccacgaggtgatcttaagtagatttcagacatgtcatataatagatttagacactgtcttcctgggtgccccttaatattctgacatacagagagagagaagttgtcaacttctagccaactaaggcttccttacttaggataagtgaacttaaccacagagagaatgaggatttgatggaaggggcaggagtcatgtatcttaaaaatgtgtttccttttgaagtaagcatcaaagttgttagaaagatccttaataaaataagcatcatggtgggtcactatttatatttcccaagcagggaaacctcatttgagtgttatcatttgctccctaattgattgactataaatagtaatacagccatttacctcctctcaaaaaggcctcctgattgttcatttgagcattaaagcaatgctaatgcagggttttatctcttctcagccagataattatgatttttgagaaatgccctgatatcctacctgcttctatttccacatctgttttttcttttttcttcacactgttattgagagttaacccaagacatcactgttgaatggtaaaagttctagggtcccaagagaagcaaatgaactgagaaacagcaatagcacagaattgtaaagttactaagtgcaggtgttagttgccttgggcatctggttaagcttgacctaaaccatgtaatgatctggaggagtcgagagccatccccaacctctgccaattgataaaagctcccagaaccatactttttgtgggtttctacctctgcaacttcctttttgtcccgtactacccatttgtcattccagacaacatgcccagccttttcataaattttcattttaaaaattccatttttctcaagtgttttgtgactttggtaatctgattaagaatgaggatagtgttaggcatggtagctcatagctcatggctgtagtctcagctactaagcaggcttaggtgggaagatgacctgagctcaggaattctaggctacagtgagctatgattatgccactatactcaagctcaggggacagagccagaccctttctctaaaaaaaaaaaaaaaaaaaaaagtacgaagtgaggtggaagaagccttttcttatttcatcacttaccctcttaccctcttccactgtcttcctctaccttactgtctcctccctcttgaggggaaaaagcaaatcttaccccaagtctcaagctaaacaattctatcctcattcaggccctgaaggctaagattctactctaagatgaatttatctaggcatcttctcaacaaggaaagtgtgtctcttccctcagggaattctttatccagccgctaagaaaattaaatcatctccttgaatcttcttctcttgctttgaccgagctcatatcccccatctcatttgccatccctttgacccaattaccacccaagatatgagaaaggatagaactggtcatctcattttgtgaagaagggctgacattagtttgtttccaaattgcccttttaaaaagaaaaagtgtcacgtatttaagtgttttggggaatgaagtatctggttactcatggagtgcaaatgagagcttccaaagctttgctgggcaaatcatcctcaatagcaaaatgatttatctcatctaatgaaaatgcaaatgggtgtgtaccctgtaccataagggtgactctctctttgggagaaaaaaatggggaaaagtctaggctttctgctacatttggagctgagatgacctcctaaagtaaagcatagacacacgttacatgggaacctgagtttgattagtaaccaggaaactggaaatagtttttttttcctccaaaaaattactttaaggaagaggtcagattcaaataccaaatctgcaattcaatagttatgcctactgaggccagttaaaaatcctccctgagcctctttttcttcatctatcaaatagtagcaaggatgcccacttcacagagatgctgtgaggattaagttacataatcatataaagtctcaagaaatgccagtcttctttcctctcataattcagacaaactcctacagatataacttaggcagtccttacagcactgcatttcacttcaataaatttgttcttaaattacagctatgatggcattccagtaatgatggaattgattcttttttaaaaaatccacactatttgtactctgacaaacaaagttgttactaagatttttacataagtgagtatcacagtaggtcacaatggcaaagaattttctttatagtggaggaagtactatttcagaagtggcaaagctacctggagctgatcctataaaacggatgccagataactttgtaatattgatgaccttctgccctccacagcacttaaggtacattagagttctgtctttagaatagctagtgaggtgcctaatagatttattcacatttgtgggaggaatagtgctgaaattttctcatttctcattatgctaattactgctttaaagaacttctctgcagataggttttaaagaacctataaactttctttaagccattatgcaattttctattaattatcttaacaatcataaagtggttgacaaagcctggtaagtacaacatcagtacttgattgcagttccataattttcaccccccactacacttttttttcttgtaagatgacttcgttgggatctgatccaacttctttcttgcttggcctaagggctccatgtccatttgtttgcttgagtggcaggggaaggacagttgatgctaccattagatgagtattaggaactccactttataaactagagttgagctttggggagagagaagaacttgctaatcttggcttggtcacagtaaataaaagaatagaagatggcaagaactcaaatttcttggcttgtagtgacaagcttcctaaagtaggctgatgaggattctgatgagggttcacactggcagagagttgtaggatatcaaacctaccctgatacatgaatggtggcttcatcctagagttccaaaaccaactggttacccctagatcctgccaacctcagtggcttttcagcatccatctcgttcattccttgttgcccaatgacctgtgtaaggcatgattcctgatttgttccatccttcttgcttggattcttctactttctggcatccccatcatcctactagggctgggcaagattcccattggtatcctaacctgtttgactctctctttgagttaggcacgtgtattagtatgttttcactctgctgataaatacatacctgacacggggaagaaaaagaggttcaattggacttacagtttcatatgcctggggaggcctcagaatcatggtgggaggcaaaaggcacttcttacatggcagcagcaagagaaaatgaggaataagcaaaagcggaaaccccagatgagccaatcagatctcttgatacttattcactatcacgagaatagcatgggaaagaccagcccccgtgattcaattgcctccccctgggtccctcccacaatacgtgggaattctgggagattcaattcaagtttagatttgggtgaggacatagccaaaccacatcaatctgccccagcccctccaaatctcatgtcctcacttttcaaaattaatcatgccttcccaacagtctcccaaaatcttaactcatttcagcattaacccaaaaatccacagtccaaagtctcatctgagacaaagcaagtcccttccgcctatgagcctgtaaaatcaaaagcaagctagttacttcctagatacaatggaggtacaggtattgagtaaatccagccattccaaatgggagaaattggccaaaacaagacgttacagggtccatgcaagtctaaaaaccagtagggcagtcaatttttaaagctccacaatgatgtcctttgactccaggtctcacatccaggtcatgttgatgcaagaggtgggttcccatggtcttggacagctcttcccctgtggctttgcagggtatagcttccctcctggctgctttcatgggctggcattgagtgtctgcagcttttccagacagatggtgcaagctgttggtagatctaccattctggggtccggaggacagtggtcctcttctcaatgctgcactaggtggtgccccagtagggactctgtgtgtccccaagtttcccttccatactgccctagcagaggttctccatgagggccctgcccctgcagcaaacttttgcctgggaatccaggcatttccatacatcttctgaaatctaggcagaggttcccaaacctcagttcttgacttctgtgcaactgtaggctcaacaccacgtggaagctgccaaggcttggggcttccaccctctgaagccacagcccaagctgtatgttgtcccctttcagccatggctagagtggttgggacacagggcaccaattccctaggctgcacacagcacagggaccctgggctcagcccatgaaaccactttttcctcctgggcctctgggcctgagatgggaggggctgccctgagggtctctaacatggcctggagacattttccccagggtgttggggattaacattaggttccttgctacttatgcaaatttctgcagccggcttgaatttcttctcagaaaatgggattttcttttctattgcactgtcaagctgcaaattttctgaacttttatgctgtgcttcccttataaaactgaatgcctttaacagcacccacgtcacatcttgagtgctttgctgcttagaaatttcttcttacagatacctaaatcatctctctcaagttcaaagttccacaaatctctatggcaggggcaaaatgccaccagtctctttgctaaaacataacaaaagtcacgtttgttccagttcccaacaagttcctcatctccatctgagaccacctcagcctggattttattgtctatatcgctatcagcattttgggcaaagccattcaacaagtctctaggaagttccaaactttcccacattttcctgtcttcttctcagcccttcaaactgttccagtctctgcctgttacccagttccaaagttgcttccacattttcaggtatcttttcagcaacccccttactttactggtaccaatttactgtattagtccattgtcatgctgctgataaagatatatctgagactgggaagaaaaagaggtttaattggacttacagttccacatggctggggaggcctcaggatcatggcaggaggcaaaaggcacttcttccatggcagtggcaagagaaaatgaggaagaagcaaaagcagaaatccctgataaacccatcagatctcttgagacttattcactatcacgagaacagcatgggaaataccagccctcatgattcaattatcttcccctgggtcccttccatcacacgtgggaattctgggagatacaatccaagttgagatttgggcgaggtgcagccaaagcatatcagcatacttcaactaccaaccccgggcctccaactcaagcctttgcttttgaattgctaaattcctgagaactgtcactaatggcccagtgccaactggagccccttaggtgttggctgtctccactggggtgatcctctcttgccatctcctggccaaagctggccactgtggcagaccatctatcttctgccattcatttttcccatcccaaggtagagcatggatgaatgataatgcaatgtacctttctaggtgaaggcactttggaatgactggggtggtttcaaagtaagagaagctctgccctataatggtattttcagattcaggctctagatagtgagatatctatccaggcagactcctatatgggtatagtagaccctgaaactttagaattcatatggtaaaattggaagtctgagctaacaataacaaatgctcttgagaaagacctagtcttttctcagcatctgataagggggagctgaacaggtgaagtatctagctgttaattttatgaggtcactaacactttagcactcatcaagatttaggggcctaattaccaagactattaagacttcttgagtttggcaagagaaatgtaaaagtgttttaaacaccaaagctttttgtcattttttactcgctgtttctttatagacactgactaaaccctagcttaacacttggcatgatgtgcactgcccttggatacattcttggtggatgataataaatggatcaggagaaattaaataattttattggcattctctcagaaggaaatagaaactttatggaagaacacagtcaaaaatttctcttggatatgccaggaaaggtttgcagtttgaaattgttgcagagtgcatctggaaaatgcttcaaaatactagcaaccctgagagtttccagaataaaaatgtctaatgtgatgggataggtgaatcctaatatgatttattttacaataataatgtagacaagtggcctttgtattcaacaaatcccattacaaaacacacaaaggaagtaatcaacattagaatgtgtgaattctgactagatctgatgcctggcttctgaatattaagaaacctgtcaaactcactgtgactcccagcaaagcagctgtcagatttatggtttctgaaaacccagtgtaacagtaattgatttgtaattgttttgtattctttcatccctgcaggttataatagaggcagtggataaaatatcaattagtttcttggtgtaaatacaagtaaagtcagtggtagcagttttcaaatttaatttttttaacatctgaggaggaaggagtttattgtagttcagcaatagtcatctgtcacaggtccgtatggctgttttcatagtagttgcaaccactgtctcctcccctatggaggtttgggctgccttttcttattcagccaatagcttagtttataccattctatagcagattatgtactcacagctcccttagtggctcagttattttctcacaatgtatctagcaaaaaaaaaaaaaaattacctattccatttattaggtagttaggtcccagcaactgagcaagtcatttgaaaaagtaatgcatataaatttaaggaaaaataatttaaattttactctttaataatcatatttatgtatttataatagtataatataggaatgtgttcaacttttcgacatacacaatttatcatatcttgaaatcatatcggaccccaccaccctcatttcctgttccatatttaagcaaactgccaaaactctagtttcacagagacatcatgacattgaaaagaatatagtagagtaacttaacattgaaaacataaattacttaaagatagtatttaacagggtattcatcaaatacaaaatacctctgtgtttctcttgaaaacatctgatgttatccctgagttcactgtggtgcccaggggtgccttggtttacccagtttggagccatgacccatagcttcgtggcacaggagcacctgatttatacaacttcaactatactcttttgctgttggaagctattctcaggttcagtgttacacatttttaatacaacatggtccctaaatgtatatcacctaattcaacttatccacatacatacaaagaatcagaatctattccaacacagggggaaaagttagttgttttggacttattgagagatagtatatctatatttggtatgtgacttaaggtatatttttaacttttaaatgtttttcgaatacatggtagtcacacacacacacaccattttacataaatatataattgtgatcttgtcatcaccttttaaaagagcaatctcttttttttcttatacttctttgtttggttccaccctcttttttctctctctttcaatatatattcctattcaaatgtaaataacttggaatataacctttttggtttttctctttgcccatgtaatcttatatagatattgacacacaaaataatatggacactggtcattgatttatatgatggaaacacagtgcctatcatttcttataccttgcttttttccataaaaaaaataccttatgaaaatctctgcaagtcaactgatattcactctttcaaatggctgcataatctcccatggcataataaaccacccattattctcctgcctatgctcttgttgatgggcattcatcatgtttccagtttatttggcactaaaaacagtggtatagttcatatatctcttcatattttttacatggtggtggttttatttctaaggggtatattctgaagtacagaattgctgggttggaggacgtagttaacatttaaaaaaaaatttaaagtagatgttgctaatagtttgccccaaagtctgtaatatccacattcccaccattaatgtatgagtaatctttggtgctatatctcaagcagaatagattttatcttttaaaaaaattttaaccagtctgatggaagtcaagctatatgtattgttatttcaatttgcaatttcttgaacattactgactttgagcattctgaaatatgttggctatttggattttttatttctgtgaattatctgtttatgttctttacccagttttctgctatatcgttcatctttctcttaacaattttcaacattttattatacattattggcattaactttttgtcatttgaattgtcttgtacctaaatttcttctacatgtatcatttgtctgtcgactttcattatgagatttttggtcacacagatgttttattgttttatgtagccaaatatgtttacttttaaaaacttctatgtttctagacttagttaagaatgattcctttttccctaacatatacatgtgtagttacaaagattttcttgaattttttttattgttttactttttcattatatttgagaatttacggtctctagacatgctttttaatttcagtatggagtaaaatgaagcaaaattttacttttttcttaggttattaggcagttgaggacttattacataatttatttctttcctctgagatggacttttctcatgaataaatactcttaaatactagcaaccttttctgatctctctattttgttacatggatctatttgtttattcctataccaagcctatatttatttgagcaacattagcttttatattttatatacaatttatattttatattttattattttctaatatctggaaaaagaaatttctcctcaccggcattttcttttcacatttttcttgggtagactcaagtatttcttctttgatataaatttggtgatcattttgtcaattcccccaaaacccattgagattcttattacaattgcactaaattcgtatactagttttggagaaattgtcatatcatgacataaaattttaccattcaaaatcttggtatgatttgcatagatctcatccttccaactgattatacaaatttcttcagttaaatgttgtgtctttcatgttaaaattaattgcagcagtagtcttccatttctgagaatatggaatacatgtacttttccccattcatctcactaaatatggcaaaaaccttgaacattaaatgtaaaacaaacataagaatacattaaaagttggaaagaaggatgcagactggctagggaccttgagacccaaagaaaatgacatagtggtgatttctcttcattttttgtttgtttttctgccttatatatcccagaccaagagctgaagaagccaacaaccagcaaacattaaagtgtgctgacaaaaatgccccagcagaagcctactctccctacccaaaggaccaggaaagggacagccaagctagacaaaaaaggttctagacaataattactctagccaaacaccagagaaaaatattgtggctccacccctgcccatgccagcaaagaccaggtgggcaggggagacttctaccctctcaaggctataataagatgacctaacaccctagccaggatggtgtcagaaaatgctaagtagggagctggagatttcacccccactggctggtaaaagctctccaacttgcattgggattaaagatcacatggtaaatgtgggctttcactcctaacaggtagtaacaaggcatccttcccccacgtcgctggggaggtgttagaggaggcctagtacagagtcaggactttaaccattgcccagtagtaatgaggccatccctactatggtggcaggggagaccagctagggaaataggactcccattcctgcccagcagtaataaggagcctcaagctttggctgtcaatggaggccaggtagagaatttggacttctatcttcacctgtagtaatgaggcagttcccctgctttccctacaaaagcagtgtcgaaaaaacaaacaaacaaacaaaaaaacaaaaaaaaaacagctaaacagaagatttaaataagatccagagtctcaaaatacatacaaaaaaatgtctaggtttaacttgtcataccaaaagccaggattatctcaaaccaaatgagaaaagacaatgtattccaacactaagatgacagagatgttaaaattatctgagaaatattttaaagcagccataattaaagtgcttcaaagagcaattactaatacacttaaaagaaaataaaatgaaaacctcagcaaagaaatagaagtataaaaaagaaccaaatttaaattttagaaataaagtatacaacaactggtattaaaaagctcatggatatgttcaacaatagaatggaagagatagaggaaagaatcagtacattggaagatagaacaatagaaatacctaatctgatcaactgagaaaaaaatagattgaaaacaatgaataacacttcagaaacctgtggaactataagatggaatattcgtgttgtcatagtccaagaaggaagggataaataaggcagaactaaaaaagtacttgaagaacaatggcagaaaacttacaaaatttgacaagatgtaaacctacagcttcaacaagatgagtgaaacttcaagcagggtaaacctaaggaaatccatgccaagatacatcataattaatcttctgaaaactaaggacaaagaaaaaaatctaaaaccaggtaaagaaaaatgacattttgcctatagggtaaaaacaatttgaatgacagcagatttctcatcaaaagacatagaagaaagaaggaaggggcataatatttttccagttctaaaagaaaagaactatcaactcagaatcctatacccagtgaaaatatccttcagggatgaaagagaaatcaaaacattctcaaatgagagaaaactaaaaaaaaattgtcaccagcaaacctaccctaaaagaatggtgagacaaagttctttaaatagaaaggaaatgataaaagaacatcggagcatcaaaaaaggaaggaaaggcagtacacaaaaatatagaaaaataataggcattttttctcctcctgaattctgcattatgtttgacagttgaggcaaaaattgtaacactgtatgatgtggttcttcagtttatgtagagaaaatatttaagacaattctattataaacagggataataaaaggacattggggaaagtaaagtttccattatgtcacttgatctggtaaaatgatgctactcataagttaggtatatacaatgtaatacctagagcaaccactaaaaataatactcaatgagatgcactaaaaaacgctacataaatcgaaatgaaatttaaaaaaatgttcaagtaacccataggatggcaggaaaaataaaacagaaaacaaacaaaaacaataaaatggtagccttaaattctaccatatcgataattacaacagatttaaatgacttaaatataccaattgaaagacaaagattgagaagttggattaataaacactacccagttatatgctctctatgagaaacttcaagtataaaaatacagataggtgctatagtttgaatgtgtcccgcaaatgtcaggtgttagaaatttaatttccaaattcatatactaattgaagatgggacttttgggagagaattagaattagataaggtcactcaggtgaggccccatgatgagactggtggctttgtaggaagagtaagagagacctaagctagtatagttgctctgtctcagcatgtgatgcctcccacaatgtcatggcacagcaggaaggccctcacctgatgctggagatatgctcttggacttttagcctccaaaactgtgaactaaataaatttctgttcattagaaatcacccagtctcaggtattctgttacaacaaagaaaatggattaagattgtaggttaaaagtaaaaggatgaaaaaggatatatcatgcaaatattaatctaatgaaagcagacgtgcctaaattaatatcaaatacattaaacttcagagtaaagaaaattgccaaaaaagagagaaatcttatataataataaaagtatgaatccattaagaagacataacaatcttaaatgtgtatacatgaaacaacagtttcaaattacaataaacaaaatcagaaagaattgaaagaagtaatacacaaattcacaatcaaaactggagacttcagtacacccctctctcagcaattgataaaacaactagacagaaaatcagcaagaatatagaactcaaaaacattatcaagaaacaaaatcttattaagttatggagcacttcactccaaaccagcaacatgtacattatttgcaaatgcccacaggacataatattaagatagactatatcttgggcctcaaggcaaacatctacaaatttaaaataattgaaataatattggatggattctgtagccataatagaattgaactagaaatcaagagcagaaacgtaacaggaaaaatcttcacttgaaaaacaagcaacagacttctgcataatccatgggtgaagcttgtattatcctgatccaaaaacagtctcaagggaaatgtaaaaatacattgaagtgaatgaaaatgaaaatacaacatcaaaatctgtggcatgcagttaaagaagtgctgagtgcgcttctaatacatgaatgcacatattagaaaagaggaaaaacctcaaatcaataacctagaaaaataacatcaaagtaaatcaaaagcaagaagaaagaaggaaataatgaagataagagcaaaaataaacaaaattaaaaatagaaaaacaacagagaaagtcagtgaggcaaagaattgtttgaaaaaatcaataaaattggcaaatcctgtaacaactgggaaataaaaaaagagagaagacacaagttatcaaaattaggaatgaaaccaaggatattgccacacatcctgcagacatcaaaaggataataagataataatacaaacaattttgcacacataaatttgacaatttagacaaaatgtcagatttatcaaaatttgacatttggcatttgacaatgtcactttatgaaaaacacaaactgcaaaaattaacccaaaatgaagtagataatttgactagtcctataacaattaaggaaatttaatttgttatttaaaaggagatctcccatcccagatggtttcactggagaattctacccaatgtttcaagaagaattaatcccaatttacacaatctcttctagaaaataaaagaaaggaacacttctaaatttattttataaagcttttataatcctgatatcaaaaccagacaaaaaaattattaaaaaaaagaccagtattcctcacgatatagatgcaaaaattcttaccattagcaaatagaattcagcattatataaaaagaattatacactatgactaagtggggtttattccagggatataggactagtttaaaatttaaaaaccaaagattggtttaaaatttgaaaaccaatcaatctattacattgccataatatagtaattcatatagtaccatatatagtagtaatccatatagtaccataatatagtaatcctgttaatattacattaatattaacaggctacaaaagaaaatcacatgatcatattgatgccaaaaaagcatttgagaaaatttaatatccatctatgacaaaaactcccagaaaaatcaggatagaggagaacttcctcagcttgataaagagcatctacagagatcttacaactaatattatacttaatggtaaaaaactgagtgctttcctccaaaataggcaacaaagcagggtatctgctgtcactactctttttcaatattgtgctagagtatctagccagaacaatagtgtaagaaaagaaaataagcataaaaataggaaagtaagaaataaaactgttcctatttacatatgaaatgaatgtctatatagaaaattccaaagaatctaccaaaaaaattctagaatgagtaagtgagtttcagcaaagtcagttgcatttctatacaccaacgattaacatgtagaaaccagctgggcatgtggtacatgcctgcaatcccagctacttggcaggctaaggcaggagaatcacttgagcacaggagtttgagatcagtctgggaaacgtagtgagaccctgtctcaaattttttttttaagtggaaaccaaattttaaaatactaaagtgaaaaccaacacttacagttgctaaaaaacaaaaaacaaacaaaaaaagttcttatcatatacaaaaatcaactcaaaatggactaaagacttaaatgtaagacctgaaactacaaagctactagaggaaatcaaggaaaaactccattgcatcagtataggaaagaatttttgaataaaacctcaaaagcacagacaacaaaagcaaagatagacaaatggattatatcaaactaaaaagcttctgcacagcaaaataatcaatcaacagaacaaagagacaatccatagaatgggagaaaatagttgcaaactatacatctgataaggggtttagatccaaaatgtataaagaactcaaacaactcaacaacaagagaaaaaaaaaaaaaacatgattttaaaacagaggcaaaagacctaaatagacatttctcaagagaaaacatacaaatggccaacagatatatgaaaaaatattctacatcactaatcatcagggaaatgcaaatcaaaactaaaataagttatctactcattcctgttagaatggctactaccaaaaaatcaagagaaaatgagtgtttgtgaggatgtggaggaaaggaaacccttatacactgctggtgagaatgtaagttaatacagccattatgggaaatagtttagaggtttcttaaaaattaaaaatagaactacaatataaccccacaatcctattgctgggcatataaccaaagggaataaaatcagtatatcaaagagatatctgcactcctatctctattgccatactattcacagtagccaagatatggaataaacctaaatgtccatcaacagatgaatggataaagaaaatatgctatatatacacaatggaatactattaagccataaaaagaatgaatttctgtcatttgtgacaacatggatggaactggaaaacactatgttatgtgaaataagtctggcacagaaagacagataccaccttatctcactcatatgtgaaatctaataagttgttctcatggaggtagagagtagaattgtagctaccagaggatggggagaagaggggagagaaggccttggagagagattgttcagcaagtacaaagttacagatagaataaataagttctgctgttttattgtacggtagaatgactagagttgacaacaatgtattgcatatttcaaaatacctaagagagagtgattttaatgttctaattacagggaaatgataaatgtttaagatggtgggcatgctaattaccatggtttgattatcacactatatatgtgaatctaaacatcacgttgtaccccataaatatgtacacttattatctgttgatgataaattttttaaaacctgaaacactaaggcataaatctaagaaaacatatacagaacttgaagctgaaaactacataatgtgaatgaaagaaatggaagatctaagtaaatagagacacatgccatgttcgtggattaaaagactgaaaataataaagatgtcagttctcaccaaatttataaacaggtttaacataatttctataaaaataccagcaagatattttttagatatagacaaggttgttctaaataacaaaagaagtagaatagccaaaacaactttgtaaaagaagactaaagtggaaagaattagtttgctctgtctcaagaattaccatatagcaacagtaatcaagactgtgtggaactggcagaagggtatacccatagaccaatgtaacagaacaacagagaaaccagaaatatacccacagaattacaccaaattgatttttgacaaaggtacaaaagcaatccaaaactggtactgaagcagttggacatttatagacaaagaaaaaccttgatttaagtcccatacattattaggaaaaataacccaaaatgaatcacagacttaaatgtaaagcattaaactataaaactttcagaaaaaaataggaggaaattttggggctttagggttaggcaaaaagttcttagacttgacacgtgcagcataatccacaaaggcaaaaattgataaattaaaatttctcaaaatgtaaagctttggtctgcaaaagacccttttacaaggaggaaaagacaaactacagcctatcagaatatatttacagaccacatatgtaacagtactagtgtcttgaatatatttaaaaatctcaaaactcaacaataaacaagcaatccaatgtgcaaaagacatgaagagacgtttcatcaaagaggacataagacagcaagtaagtacatgaaaaggtgtttgacatcattaggctattatgaaaattaaaattaaaacaacaacgagatactattacatacctgttagaatggctgaaataataaatagtgatacagcaaatgctgttggagatttggagaaactgaatcactcatgctttgctaatgggaatgtaaattggtatagccattcttcaaaacagcttgtcagtttctttaaaaattaacatgcaactaccatacgactcagcaattgcacacttgggcgtttatcccaaagaaattaagatttgtgatcacaagaaaatctgtagacaaatgtttataacaccccccatctgcagtagcccagaactggaaacagatgttcttcaacaagtgagtgtttaaacaaactgtggtacatctatatcatggaattgtactcagcagtaaagaggaacaaattactgatacacacaacaacctggatgaatcttcagagaattatgttgagtaataaaagctaatctgaagagcttacatactgtatgagtcaatttaaataacattcttgaattgacaaaatgatagaaatagagaacacattaatggatgccagcagtttagaagtaggtgaaggcatagagagaagtggttgtcactatagaagggcaacatgagggatccttgtggggatggaaatattctgtatcagtgtcactatcttggtatgatattatgctatagctttgtaggatgttaccatcggggaaaactgaataaagggtacaagggggtctctttattatttcttacaattgaatgtgaatctacaactgacacaaaataaaaagtttcactaaaaagtaagtttagttgcaagattttaaaaagtcttttatcactgttataagtagatagtttcctctctgagtacttattattaaaatagagaaaaaccaatcactttttaataaatttctatattttttattttgttttcaggcatcttaccaaatcctcttattaatactgatagactttatttgagtgtcttggttctttataaatatgcaatcatatagttagtaaaaataaaagtcattttagctattttaaaaaatatatctgcaagtttttaaatttttcttacattgcattcaaacaaattttcaaataatattaaaggataacaataatggaaatttttgtctaattactgattttcattataatgcttttattgttttttttttttttttttttttgagacggagtctcgctctgtcgcccaggctggagtgcagtggcgcgatctcggctcactgcaagctccgcctcccgggttcacgccattctcctgcctcagcctcccgagtagctgggactacaggcgcccgctaccacgcccggctaattttttgtatttttagtagagacggggtttcaccgtgtgcttttattgttttatttattatatttagattttatttgcttatagttactttaaatggtttccagcccttcctattttacagtattgtttttagcaactataaatatgatcatgtgtttccctgttttaatgtattgatgtgattaattacattgatgaatttcctgatatttaactctctttgcatcactggaataaactatttgatcatagtgtatttttgtgtgcaccactggatgcttttgccaatgttttatttagaattttcacatttacattcttaaatgaggctggtgtgtacttttctatttttctacttttttgggttttggtattaaatttatgcttgtaccatgaaattaattggtgagctgtctagctttctgtgtggcctggagcagctgaagttacattataattatctattttgtaaaggttagataaatctcagctgtgaacccatctggtcctagtgcccttttcaatggtagatctaatcaccttcacaggctggtctacagttggtctatttaagtttcccactgcctgttagataactttgagtcatttatattttgctaaaaaattatttcccattggaaaagaaacacatatgatattattttaatccttcctgaatctgtcattgttcttttatctataatcagactgctagctgttggtctgttttattttattaaagaaccacctcctaaatttacttactacttctaatatttttgtttctcttcgattttgttgatgtacacctttatctttattaattcatcctctagtttattctgatttattattattcttgtttattaagatgaatattaagtttctatatttttagtcttccttctttagtagtaaaggcatttaaggctatacttttcccaaataataaaattatcattcccataggttttggtgggaagtgttctttcagttgctttctaaggtgtttgaaatatctatttttatttttcctttaatacaaggatctctaggaattttgtttttaaatttcaaagtaaacaggatttttggtcactttttaattctttatttttatttttgttggcttttgttcagaggatgtgtctggttttaactttattgattttacttattgactaatgattaagccaatttacataaatgttccatatacataagagaaaaaagtgcagtctcccactcaatgagggtgtttacatatatgtatacatgcaattatatatacatatatatgtatgtatatgaatacacatacatgcacaaaaagacttactattaagaattggcccgtgcaactatggaagctgagaagtcctaagatctgcagttggcagttggagacccaggacagctgatggtatacttccaatcccagtctaaaggccttagaaaaaggagagcccacggtataaattccagtccaagtcttagtccaaagccaggagaagaccggtgtcccagattgaagacaggcagagagagtaaattttcccttatccagccttattgttgtattcaggccttcagtgagttgcataaggcctgaccccattggagaaggcaattggctttacttagtctacagattcaaatgttactctcatccagaaataccttcacggacacattcaggataatatttaaccaaatatctgggcactttgtagcccagtcaacttgacacataaaattaaccatcacacccctcacagttgcaagatgggtggcaagatgggagcttcaacttcaaacatcacatcctcacatgacaaagacaatgtgaaaaagaagggatagagggcaaagatgttcattcctgcacatatctttttatgggggaagaactcatatgtttccaataattatcttctccaattccattggccaggatgggaatggggttacatgagcaggctgtggctacaggggaggccaagatagtgagcatctggcattttcagcctctgcagtaggaggctggctcactagtaagaagaatgagagaagagcctcaactgttttggcaaagttgcccgccaaacctctttcctgctttcatagtcaggcaaatcttcctctagtattataattataattaaagtaccaactctttgctgtgtcaaggtgctttatgtgttccctgtttcagtaacgtaagatttttcagaaaacttatttccctgacttttgccttttacctcatatgagaactttgaaataccttgcccccaaccctcaccccaccctattccattccatcagtaggtttttctgagatggcttattatttttaattctagactgttatgagaattcccttaacagattggcccttctatttgagagtcctttcccagcacattctcagactgtctagctttatctcattaggtataaatgtggacctgatatgtcgtcagttcacactggtatacctatcttggttgtttacaacaatcatccattctgactaaccctgcatttgctctgcttggatgatgcctttactgaatcagttgttaatattttaaatactgttgtcatttactttacattatgccgggataaacaaacagtgaaccagaaatacagtagaatttacattatgttagacagtaataagtgctaaggagaaaaattaaagcagcaaatggaaataggaaatgttagagggagatattaatgttacagatagggtgcaagaaaaagcttcaatgagaagacatttaagtacggatctgaaggaaataagagaaagagccatgtggatatttagaggaagagcattctggcagagttgacagcaaaggcaaaggccctgacacaagagtatgcctaggatgttcaaaggaacagcagagaggccagagtgaagggtagagtggtattatatgagatcagaatggtaataaaggagtgtttgtgggcagggagtcagactttaaagattacaatgaaaagtttgagtgaaatggggagttgtcggaaggttttaagcagaggaattgtatcatctaacttgagttttaacacgattactctagcttctgcattgagactagtttaaagaggacaggggaggtgaaggggtactagctaagacagtatcctaataatccaagagaagagagaatagtgacttggcatgaagtggcaacagtggggaaggtgagaagccgtgagatccggtatctattttaaaggtaagacaacaggatttggtggtgggttggatatggaaatgtgaggaaaggatgcatttggtatgaccctaaggttttcgcttgagcatctagaagaacggcatgggagggaggtagttatcaggaacactataggcatgtaaagtttgagctgcctcaaaagatgttcaggggagacatctgggcctgagatatccattcatatattttatttaaaactatgacagtgtataagatgacctagggagccagtctagagaattaagcctttgatcatgccaatatggacagctgaacacagacatttccttatacatagatgaggagttcctgcctgagacaagaccaagaaatacccagctgtaccagtcacaggccagctccatctgaaggcacagtgacagtttgagccttagtgccttatatcccatatcccattcccatattacctttataaacttctttctttcatccatgaggtctagtgaatgttttgtctcaagaagccaattggttctgtgggtaaaagataagaggtatctcttcccattctgtgcttactattcttgaaaaagaattagggcaagtcgctttgacattcatatatggtacagagagaggtaactgggatatgatggggttgggggagcaaacaaaatacaacaaataaaaacctggaacagaaaaactggctttgtgttcagcattgccaggagcaaaatgtgtgaacttagacaagttactaaacttcctcaagtgtcaggttcctcacctataaagtaaagatattgattgtatctaccttgtgatgcttgtggcatgtaagtacaatagcatgtagtagatgttcaagaaatgtcatcttctttcctttactggccatggtggccaaggaaaagccatttaaatccacaaaataatccttaaatttccatgttagttgtttcttctctaccaaactgtctactttcctatagtcacattgttttaaggttacccaggatttgttttaatcaggtatggtaagacatgcagacacagaaatgactgtcctgaaagaagatgtttatactcacagttccttagaaacaggaagcacagccacagggggaagcagcagcatgggtcaggaggcagaaggacagaggggaaaatgtacacgagagccttttctctgtgagcaagaagtgacaaggcagggtaggcaggtgtaggattgacagtttaacttcagtagcctctgaggcagaagaactgtctctagctgtacctggtgattagggcaggggaatggcccagtgtgtaaaaagtgaataaaaaaagatggttaaaggcaggggctctggactggtttgtttggctctgcaggtgagcttttactgtctccaggaattagctagccttgagaggactgatccctccagggtcagcaagtttccatgacttcgaagtataaaagtatagaaaataaaaagcagcctggccaacatggcgaaaccctgtctctactaaaaatacaaaaattagccctgtgtggtggcaggcatctgtaatcccaacttcttgggaggctgaggcaggagaatcgcttgaccctgcaggaaggagtttgaagtgacctgagattgcaccactgcactctagcctgggcgacgagagcaaaactccatcttaagaaaaaaaaaaaaaagaaaaagaaaaagacatgatgaatatgtacatattatgttttgtttgtgtttgtgcatttgcattgaatcaagaaaaatgatctcacatttgattaagcaaaatcaaggaattgcaagtgaaccatggataatccataaccactaaacatatcccctaggtaattaaaaactatccagtctctggctatcaaagccagaaaaaaacaaacaaacaaaaacgaacaaacaaaaaacccacaaaaccaaaaaccccatatttaaaatcaggtatagaattagaatttcagggttggaagaaaccttaaaaatgagttcattccccctcccttccccatctgttgcttaaatttcttcttcatgcccattaagtggtgtctgggtatttctgattatatgaaaggtcttcctttatggagccaaaatttgcttcctttggtcgcccactggttaattcttgaaagcctgatgtcttgctgtacaaatacaaaaaacattcagctcagctcccagcacaactgccagatcagataagatgtgtataatgggattgcagaactgctcttactatcacaatgaagagccacttggatttgtcacatgtgctgtatatctaaagatgctacttacgataatttattttctgtctttctttgagctggggcaggaatgtctccaccacaaggcaccacagagtgtggccaataaacactgccacacagaatatctatcctgtgcactcaaggatttcagcagaatgaatggtaccttgagtaacacatctattataaactggactctatgcattaggatggatggagatgtatctagcttaatgctgaatccctagggcccagtgctgaaaaaatcatatgcactcattcaatcttccttgagtaaataagtaaatgcacggaaatcagtaaaaattgctaattggaatcattttggaagaatttactttagatgaataaataagacattttaaaagaaggttttggttgctattttttttttaaagtcctctaggaggataagtttaagcactgaaatcattgatgttgtcacaagaaaacaatataccttgggttacatttcctgagccctctaacctgttgagcaaggggccagcatagaagggctattatgtagcttcaaaaagagaatgaacattggggacttagcacagagctcatgataaacgcttgaagtcctctatctattgttgacttgctacttctttaaggtcctgagagtgcccagccctgtgcttgtaaaatgtaggcatgcaataaacatcaatcacttgatcattttaatgatgctgacagtgatgatagtgtgatgggaaatttcaccacttaagatttgactccactcactaatagttctttcaccttatgaaggatccagcaatgtcatcccttcattgtatcaacataattaatgacaagtgagtaggagtgatgccagagtattagtgggaggtggctctaaaagagacacgacactcgagaccatcctgaccaacatggtgaaaccccatctccactaaaaatacaaaaattagccaggtgtggtagcgagtgcctgtaggtccagctactcaggaggctgaggcaggagaattgcttgaactcgggaggcggaggttagagtgagctgagatcgtgccactgcactccagcctgggtgacagagcgagactccctctcaaaaaaaaaaaaaaaaaaaaaaaaaagacacaatacttcataaaaagaggcactgaatgtacttaaagacaggggaagcagaaattttagaatggaaaggagaaaaaggaagagaaggatttttagctcttctaataaagaaattatcttgtgacagtcttagggtaatttccataatgattcattcaacccaagtggttggtagtgaattgaagatctgttgagattaattttctgattaccaatcctgtttatttatcaggaacagaaataggagaaaaagtctgcaattggagagctttgtggtgtgtggagtagcttgaatcttctagagtagaaaaggagttgatatcatctgtgatagtctagaacattctagtactcaacctattgcaaggtagagacaaggcccagacagccatggttcaagtaaaacaatgtgatccctaaactctgggtgtccaccccaccatgctttctctcaacccttgtgtaagcatcttcaactttttttttttttttttttttttgagacagtcttgctctgtagccagtctggagtgcagtggtgtgatctccgctcaacctccgcctcccgggttcaagtgattcccctgcctcagcctcccgagtagctgggactacaggcatgcgccaccatgcccagttaatttttgtatttttagtagagacgaggtttcaccatgctggccagcatggtctcaatctcttgacctggtgatctgcccacctcagcctcccaaagtgctgggattacaggcgtgagccaccatgcccagacagtagcttcaacttttacattaactgtagtagaatgttgcaaactctttggtttcaagaggaagtcttttagaaactagtaaaacaaaaagtgatatatatgaaaatagggcagaaggagtggatgccagtcattgggccaccgtggaaaacaagtccaggtattaagttaattactgccacatgggcactaccctggatttgtcactgggcagggcctgagactcatgcctgaacaaagctgtgtggccctacttaactgtggagagaaggcagggggacctgtggcacatattgaaatctgccccaggctgtgaagaaacccagctatctctgccactctaatttctgagctagtttcatgatgataagaatttgtagtaacttggatttggcttcagatagaagcttaacattttaggaggaggtaggggagagaagttgatcaagagagacatcagggaaaaatagaggcagggtctatggaaattgggcaaaataccaaatgcattcataggtgtctcatttgtttattaatttaatataataaaaaatactgaacaaacagtatgttgttggcactttgccaagcatggagtatgaagtcaacttgccccacttgtattttaacttctttgttctcagagaaaatgcctctaaaacatgtaatagagatgtatattttcttaacacttcaatgcaaacttcttaaaatgtctttggttggatattaatatatgtatttcatgacagagaaagagagggctaaacaagtttggaaaatattagaaaacctaacacatttatttgctgcagaactctttaagactctttaacattgttctgcatgatgagttcctaagggaagggtacagtgggaagggttctcaaaccttatttgactgcagaacagtttactttctggagctgcctgtagagctagtgttcatgaaacatgcttcaggaaatgctgctttaaagtattaatcatcacatttagaggacatgcagtaatgtctgatgataatgctctgctatgtgagcccaccatctcagtctggagaggtgtgaggtcctctctgactgatgtttttgcagtagggttcctgggctaactcatttcctggcatggcctagttccatagggttgcttttttaggaaactgtttttttagaattttgtttcagatgttgtgagggaaaggccttactaacaaaaccacaatgaaagcctgaatgtatgtatgtgtatgtttatgtttaaaccctgatgctgaagtgctgggccctagaccttgtaggcacgctgtgcaagaagctgtgaaataagcagtttggtgtggtgagatgagaactgcaccaggaatcaggtgatatagctagattcatacctcaactgccagagtagttacagaaatttgagagtgtctttttttggggggcaggggagggacagggtttcactcctgttgcccaggctggagtgcctcagtgcgttcatggctcactgcagcctcgactccctgggatcaggtgattctcccacctcaacctcctgagtagcagggactacaagagtgtgccactatgcctggctaattttttgtattgtgtttctagtagagacaaggtctcgctatttgtccaggctggtcttgaactcctgggctcaagggatctggctgcctcggcctcccaaagtgctgggattacaggtgtgagtcactgcatggcctgagagtgtcattttaatatctatggacctactccatattcctctactaaaaattaaacctcaggaatagatgaggaatgacatacatgtgacacaggagatactcctactcctcctatattcaaggcgggcattgctaagtgatcattcttctcactaaattcagagacagcttcagatatgttcccaacaccacatttccaccaatccctcaattgagagacaggatgaaacccactgccattcctatccttaatgttctctaagaatttaagatccaaggttaccgctatcaagaacatacatctacaatcctacctttttcatggtaagagcaaagtgttatggaggggtgactgcctcctgatttacaacaaagtgccatgggaaagagaagtgggcatagggtgaagggctcctccctaaccagtggcatttggagaaggtccacttggatcaggggactaattcacaatttggtcaattgggaattgactaataagcaggacaaaaatttatgattctaaaggacttggtgaaggagagggagttggaacccgaggaagctgatcccaagcttcagggcaacccccatcacttcacccttccttggaacacctatcgtgaggagggttgaggcaggcctcagcaaggccaccttcccaatctgctggctgctgagcatgtcagacctggggtgcatatgcagcatcccgcagatgagttcctcttcactatttttaaacatcaattaataagaaaaccaaggctctccatcctcgggtgacctctctggaggactccacagctgtaacagagaaatgagatggtgggaacatcctgttaataaccaacatctgagtgaagtgaaaattgctttacacttgtgtgggattagactcctagcttctataaactgaggatctgacagtcactgcaagttcgagtgactgcaatccaacaccttcctgctcccaatcttggcaggctctgcctgcttttagcaggcaggcatgaattttgtgaggcagtttctgattgcttgatatttatgtgccagcttacagctggagttggggggtatacggcagttgatttaggactgaaaaacatcttctatgttatagaatcatatcttgtcctctggcctggaacattttgatttctcatgagatattctaggggggctttagccaagtggaaggaacttaaagagcaaaatataacaagaggaggaagagaaagtttgaagattggtaaacactgtgctggacactcaacagtcacactgaagagacttttcagggtttgttgcccagacgatggtgtttggagcattgagcattctgaatggccccacttgaaaaattgctgtggtcagatggtacctgaatatatttgtcttcttcaagagaggtgctatgtcatgggaaacagctttaagggaaatctcaagtagttccatcactcgacagctgggtgaccttaggcaagttaacctttttggttctaagtttcctcatgtgtaaaacagtaagtcataatatatagttgttgggatgattaagtggaataaggtatgtaaagtggtttaaataattcttggtgcatacccattgctcagtaaatgctccttatgatccattgttgagtaacattgggaaatatggtgttgtcactaacaggaagttaccacaaaaatcacatatggattacaagttttcaaagttttaaaagcccataattcattaatcatgaaccatcagaatggacacaatttcacctgcccttgagatttagaagctcttccaggttctgtaatatcttgaaacatttttaagagcattaaggaatcaatcaaagttccagcagaaaaagagatgttcatgaagggaccgcttcaagatgtgtgggcaaggttaaaggaaccagcaagagactctgagatgccctgggactagcaatagtcagaagctactattagagggacttggtgggcagacagcggtggcagtgttactggaacccagggagagctggagctttgcaggaagggcggctaggagggcctgtagacagagggtacaccatgggttcctcctgtcttctagtctcctactggtgctttccattggctgaaagaaggtgagctgggccaagaaacctgaatgaaacaatccacatgtgggctggtctcctggtacatagcagagcagaaagacctggggatgtaaaggagaatggataccatattcactaactcttgtttcacaaatagggagtgtgccagttaatggagtgcttgattggataaaacatccaaataaaccaactttgcccataatacgattatttctttcattcattccttatgtcctatagtgacataagcagcagtcaaaatggcagctttcaaagaagcaggaaagtattagcatataaggtctgatccagaggttggggtgtggtattcagagtagatcacacactagccctggttcctggttgtcatccactttggagctgagccataacagttggaatatagtattattggttctacaacttaactgtgcattggaatcacctgggtagatttttaaattgctgatgcattggttccccgccacccccacacagtttccaaattaattggtttggagatccccaggtggtttcgatgcaagaaaagtttgagaattactagtatatatgttgacatcacctgggaatctccaggccaattaaatgtgtgtgtattatacaggatttcactaaactacagcaagatagagctggcacaggctagaacagtactgtccccatgtggctatttaaatttaaatttaaaattccattcttcagtcccactagccacatttcaagtgctgaatacctacatgtggctagtttggaccatgaagaacatcatggaaagttctatcacacagcactaggacagtgacaaacccctcaagctgagtggactggggcaaaagacaatgaggcatacaaaccgagaaatcagaaaacagcctcacaaactggacactcacactggggaaaaggaacagctatagaggacacgcagcatttggcactggaagatgtagctgagatctacgcttctgtggcaaatcaggcaggatttgctcatgctctgtgtggatggagccagcagcttgaaggtactgaggaggccaacgaaggaaggggaagacccagaacatattagcacttgagacctctctgatggtgcctacgggggatactcatttcatttacttctgagccacattcctaagcaaggatgcaaccctgctgtctgctttgaatagcataagtaccaggctatgtctactggtgaaacgaatgtctagctctaggttctccggcatgttcatcccaggggatccataagcagaacccagtgtgccagaggccctgttacttgagaaccaggttaactgcatggcaggaggatgaaggcagggttcaatggattgaaagtgggagaaagacacttgtcatgctggatcactcgttcagtttaatctggagtatttgaaggttttactgcttgatgggtgaagagtgcttttttggagatatatccattaagtggtgctgccagtctggatgtttcttaagtagaatggtgtatttgtttaccagggttgccatagcaaagtaccataaactgggtggcttaaacaacagaaatttattccttcacagttctggaggctagaagtccaagatcaagacatcagaatgtcagcagaactggttctctctggggttactaggaagaaattgcttaatgctcctctcctggcttttggtagttttgctggaaatctttggcatttcttggcttgtgctgaggaacaagagattgcaccactctgctctcttcctttgtgttcacatggcattctccctgtgttcatgtctgtgtcaaaatttcccatttttataaggacattagtcatatcaaatcagaaaccgaccatactccagtatgaccttatcctaagttaattacttctgccacaatcctatttccatatgaagtcacattctaagatactggtatatgaattttgagggataaaactcaacctataacaaatgacatagtataataaaaagagcatatattctagagtgagaaagactggagttgagtcttacctttgccactacttttctgatacacagttttattttatcatttgcaaagttagaatgatatatttaataggatcatttgtaaaattataaatcagtgttaaaatgaaccattatttttatgtttccctaggaaagaaaaaaattgtttccaattatactatgacatatcaattataatatgcatcccaatttcaaagatattccaattaaacaatatatcatcaattacaacatgcatcccaatttcagagatattccaattaaacaatggtatatcattaattataacatgcactccaatttcaaatatattccaattaaacaatggcatataattaaaacacacataccaatttcaaatatatcaaactgtgaaataaaagtatgttttaaagttgatgagggtaaggcttgaagaagataacatgtaagtgccttctgcctgagcagaaaagttaccatcactgtcggtcaccacctaatttgccatccatttcaagaaggaatttaataatttactaggcaggaggcagcttccacccaagttgttaaggagaaacaaaggctgtcaaatactcaggcatttttttagtcctaggaactagtgagcaggaacccctggtccatgtggcagatcagccagacagccagaaatgatgcaacctcagtatgtagacatatcacacagaaatggcacaaatcaattcaagtttccacatgagactttttacacaaccagcaaactgttaaggagttttaatcctaacaaagtagaaaatccatttaaattgaaaattaaaaccatgtctcatcagcaccaacctatctctctctgttgagtgattttgagatctgcaacttgtttgttgcagctacagaacaagccactaactctgaggccagtcacttaaaatcagcagtcacaagcagctgaaatcctgaaattgaataatgctatttctggtggcttggtgattcattttattatctaacttttgtgtggtttaatatgtctccttggaagttacatggtttgaaaaattgcctgtaataaatcctttatttttaaacataaagccattctttattcagagaaaattagtttctccctaccctcactaaataaatattgacaaaatatttaaagaatatcagtttgaaggaatacctaattataagcctgccctgagggcctcttgtctctctctggcctatgatgtcattctttaccaagacctattacccatgggatgataagggcctgaatttctccaggaaaccttagagcattcagtgactgacaataattttggcttttgccttcacctcctccccactgatagcatcacacgatttagctctcacctctcccgcaactttgcctgtggcagttccagcccttggaagtcccagagaatagatggccattgtacaaatagtcttgaattgtttgttgatgacacattgccccgcacacaagccaatttttttttttttttttttttttttgaggctctgttgcccaggctggagtgcagtggcctgatctctgttcactgcaagctccgcctcccgggttcacgccattctcccgcctcagcctcccgagtagctgggactacaggcgcctgccaccacgaccggctaatttttttttttgtaagtagagacggggtttcaccatgttagccaggatggtctccatctcctgacctcgtgatccgcccgcctcggcctcccaaagtgctgggattataggcgtgagccactgcgcccggccacacaatccaatttctatgggcagtgtttagggcccccactgtatctcaaatatgtccagtggataaatcagatctccagagacacaactgcagcctcaatcattgactttccctatcagttccacattttatgtttgtcgtctggatgatgcattactttgagcaacagtgtttatgaaaaaatgcttcaaatttgcataactatatagcatagaggttaaacacacaggttctggagcttaactacataggttcacatcccacctctgctacctacaagttgtgtaaaatcggaaaagttatggcggtctctctatctcccagtaagagaggataataacagtacctacctcatattgttataagaatgaaaacagagtgcttgtcaaaagatttgaaaagctgcttcatcaaagaagatacacaggtggcaagtaagcatacgaaaagagcctcagcatcattagttttaggaaaacgaaaattaaaaccacaatgagagaccactccacacctactagaacttaaaaagttaagcaaaaatctctttcactcctacatatttacccaaaagaagaggaaatacatgcccatacaaaggattgtacatgaatatgtcatgcagttttatatgtaatagccaaaaactgtaaacaattcaaatgtccatctgtaattgactgggggcaataaaaggataaactactgataggaccacatgaataaatctcaaaataattgcgtgaaagattaaagacaataaaagaccacagattatgatatacatttatataatattataaagaatacaaactagactgtagtctcagaaagcagatcagtagtttcttgggaatggaaggagggaaggttgagaggatgaggatacataggagtaagagaaaaatttgggtgcatggatatgctcactctcttgattgtggtgatgttttcacaagtatatatgtgtcaaaacatattgaattgtatactttaaatagatatatactttaaatagatgtggtttattatatgcaaattatgcctcaataatgctgttttttttaaatgagcaccatgatagcaggccttccaaaagtgttagttgttattgactttattattagactgaaaaatgttttagatttttttttcttttttttgagacggagtcttgctctgtcgcccaggctggagtgcagtggcggggtttcaccatgttaggcaggatggtcttgatttcctgactttgtgatccaccctcctcggcctccaaaagtgctgggattacaggcttgagccactgcgcctggccgtgttttagatatttttaaaagcttctcatgagaagcaatattcaatggttgagtctctcaccatcacaccataatctagctgcctttttcctttctaaggatgctcatgaattgaggaaagtagtccagactttgaggtcagaaggcatgagttcaagtgcccactctgacattcaataccttgtgctgatatttaaccttgagttttctcatttgtaaaatagtatacaactatatcacatgatagccataagaatcaaattttaaaaatggatgtgagcatgttctgtaaacaataaagcaatgtgaatttatcagtcatcacgattagggaagagagaagataagcattcacatttttgcagactggataacagagggtaagcaagattaaaataaaacttgacctcacacaagagcatgagatagactctacatctcctcatttcccctaggactgatgttcccacaccagaattctctagaacacttttttagagatttctgggtcctaccatatactcactaaatcagaatgacctggggttaggaaacaggaatctgagttttaaagaaagcccccccgccccccccagttgattaggatgcagctggtagcaccagtaagtgaatgatcttttgggaaaaactgccttgaccctgatgcctctcaatgagaaatgaacaatcctaggccctgttgctcatgtgaaacctggattaggcaccagaaaaaaataatgcatcttccataataactggaaatgcataatattttaaaacatctttcaaatatgcatttattattgcaagcacttcgcttattgtcattttcctgcttttcctgagcagttatattcaggattcttagtggctttctgattatccttggaaatcgtctgtcttgctaatacaaatgtttatcacttaatgtctttccatcttgtcatttcgctcaaaaaaccaagtcactcagtgctggcagcttaccttgtatagtgtgtatgaggtgtgtggcttgatgccaacatgaactttataagggaatgccactggaaaatcaagaagttagaagaaaagtaccagaattggtgcacatcacttatttgtgccctttggggcagttaaaggagaataacaaagactagagtttccatcacctgtcttctatcatctaaacctattcagcactctcttccagcaacaaggagagcaggtgccctttttgtgtcttgaggatgtcaaatgcacccacagcatacttcttggggttatttccaaatcctctatcaaaagatacaatataaatataattaaatctcttatatggctcattatttcatgaatttggaccagatgttgcaaaaatgcctctaggggccaggaagagaaattaaatgaaggagaaaggcctggaagttgctgtgagaagtgaagagtaaatgctttgtctaaatgggacagtctccaattgttgccatgaagaaatgtggcccaaggttgccagatattccaagtttttctaaaggaagggtaataaaaacagctaccttattaagtgggaaaatgaagggaaaaatactttgagtaggacaaataaagtaccttcaagtcagcttatccctgcagactaccagtttatgatctctaatttctattattcaaaactattatccctgaacaacagaaaaattatgctgatatagtaaattcttgtacctgcacaaatggccagtggcataatcagtcccatcaccctctgaatgaacatcatataagaatataaaatttagctcaaatagaagctgggtcttcctggggaagctggaacaggcagataacctttggtcagaacagtaacttgtaaaattctagtcagcaatgggctggagattggttttctgtatgcctatttattggatggggacataatcagaatcatactcttctccttgcaacccggattgtccatccaaccaataatggcaggtagtgttccttaaaggacaattttctctcacatacatccctgcataggaagggctagggctggagacaaagcactgaactgaagaatgttaggggtggctagaacaaatatcagattttctttgctaggcaacatggacatgcataatatggttaagaactgctttccctttattgagagactattttcctttactcatatgaaagtgagataaatgcttttcatagtttgtgctaacaaatgtcagaaaacatccaataaaccatatttctatttgaaagctgacagtacatagaggttccagttgatttgtaaaataggaaggatgggtatctctagtacagggatgctatagaatcttgggttatctataacttagtctttaaaagcttcccaaaatataaatggttttgtatatttttacttgtgacaagtatgtaggaaaagagccttagcgataaggatcctagtagaaaacagatggcatacccaaacagtttaacctaaaggactaaactctgtacacgggaatgggcagggttaaaagagccaagaaagaaagtgaggcatccgagacatcagagatagcaacaacaggaagccattactacccctcaatgtgaagggacaagagagaggcactatgttaccaaatcccagcaaaagctccctgtgcagaaggaagtctgctagcagaatgtgtgtgtatagaggcatgcctgcacctctctgttctcccattctctgatctcctgcgaagtcctccatttggctgactccaaccagaacccagagggcaagggtgccaggaaaatcaatccatagacatcagtctcctatgtcacagaatagtgcagaaagtggcagagatgtattaatatctgagagagggggacaactgaaaaactattatcacagaagacaaaggaaatcatagctcatggaatgttagagcagaaaggaacttttcaacctctaatctaattttcattttgttgatgagaaaactgaggcccagggaattgaaatgaatgggtgaacattatacacttaataaagggcatactcgagaccaaaggcagttattgtcttatctattctcatggtttttctacttcattatgctggaaatcatggattaggaaacttagagttggctaaaatgagacacctacatagcactttctccattactgtgcccaccagacatcactaatcaattacagatttctttcctcctgagcctagatgtgacctcaggcacattaggcaggacaaggttgaatcaatcatgaaatgcatcaatcaatcatttatgcacctgcataaacccagtgtactcaaaaatttttactgttcataatgttcacccactcatttcaattccctggacctcagttttcccatcaacaaaatgacataatgatataatgatacaattttgtataatgcaaactcatacaatgagctctaaatcttcaagttatttacatgtctaacattattttcttccctaaaactcgtctcattctctgaaggtattgcctgtactttgtacttttggactgcccacccaatgacttgctggggagcatttatggttgggaagaagggaagtgctctgagatgaattttcttgaacggtaataataaaaataatccttatctctgataggttttctctttctccttgcaggttgacaggactgaggtgattcgcacctgcataaacccagtgtactcaaaactgtttactgtggacttttactttgaggaggtgcagcgcctgcggtttgaagtccatgacatcagcagcaaccacaatgggctgaaggaggccgacttccttggtggcatggagtgcacacttggccaggtgggtcaacagacatcccttcctcctccttgccatcctagggcctttcttcctgccccctttccctctcttccttcatctaatccttgctttttcctattgattgtattttctttaacatgcagcattttacaacttcccaggtggtgtcatatccattatgtttatgtagagatgattctgcaagtctgtacgatttcttattttgaaaaattcagaactttctcttctgaattcccccactgtgtcactcatttattcaacaactattattgagcacttatgtgtctggcactatgctcttttcacatgtctgttatagccttatcctgtttcactataaatttccatctccaactcagctgtgagaacccctatgcagcaagtatttctcattcacatttagtcgacatctctggtaccaaaaatagcccaaggcagaggctaaatggatactcagtgaatgaataaaagctcttaattttccaacaataatatgaaataaatatcagtattatatccattttatcagtgagaaacctgagactcagagaggttaagtgatttgatgaaggctctacctaataagtagcagtgttaggactctactaggtcttcctgactctaaacttcatcattttgcttctgtaatacttttccttttttcctttcctttttgttgtacccagaaatgcagtaagtgagtcaaaaagtaaaaacagtccctgtgcccagatagtggataatcttactggagaaggcatagtaatatgcacttcaaatagagcagttcattacaaaataccctgggctctctatacaaggtcgtagaccttaaaggaagagagagcttttttctactgggtagagtcaaagaaggcattgtggcaccaaaatctgaaaaaaacattatctagggattgcagaagaaagaggaggggagacttccaagtaagaaagcaatataagcaactcataggggtcagaacaaacgtgggggggtatggggtgggaagagaccactttccctgactgaatcaagatgctgatttactgtgaaattgatgaagctttaacatcagatcccctctctcatgtgggccccttccatggctctgtgtcacatttttattttgtactttttttctcaaagagagattccaaattatatgtcttaagacccacaaaatctgggttcacctcctgtcaaggtaagggtcaggtttaaggatttgtcaggaagagtctacctgacaaagagatggcaagcatatatatttgcttgttcatttgtgcttaccttgcttcatgccacttatcactaaaagaaatttctcccagtgagcactaagagacaaaatagacagtgtcctctgttccccttttccagaaaatatagtgattaattttcttattcctttaatgaaagtcaaaagcccaatactgaaatacagttgaggggagacagaaagagaatctgaaatattctccattaacatatgttctctaatgacttttgaagagttgatggcagatagttcaaaggatcttgccaggtacaatgtccactaagtaggtattaaatgaataaatgcattgtggatttgagatgaaatcctgtttctatttaaaaatgattaaaatggcatcttttatagacatgtaagccatgccaagattctcccttaaacaatgggcatccctcctatgcataaattttatattttgtcacaagaaataaaggtagatccggccaggcgcggtggctcacaccagtaatcctagcactttgggaagccaaggagggcagatcacgaggccaggagatcgagaccatcctggataacacggtgaaaccccgtctctactaaaaatacaaaaaaatagccgggtgtggtggcaggtgcctatagtcccagctactcgtgaggctgaggcaggaggatggcgtgaacccggaaggcggagcttgcagtgagccgagatcgtgccagtgcgctccagcctgggtgacagagcaagactccgtctcaaaaaaaaaaaaaaaggtagatccgtgtgggaatcatgtggactaaagatctttttttttttttttttttggtccaaagctttgataattttatctgtttgaatgaccctcaaactcaaatctttagtccctcacaaggctcatctttccaaaagccagtaagtccttaaccttgcaagtaagacaggcattatgctaggtgccagtgacactgtggtgagccaaaaaacataatccttgccttcaagcagcagtttagttggggataaagatggaatgaaaataattacacaacaattaattaaatggcgattatcataagctttgttacagagaagtacagaataagagagcaagcattgggagactggcatcaggcagagagagggatcaaataaggctttctaagagaagtgacatttatactgacttgaagggagagtgagagtgcatcaggtgagaagaaagagaaacacattctaagcagatgggaacattatacacaaagcctctgtattcaggaaggagtttggcatatggtgcagagcatcttcatttggtttttccaagaagccaaatctgaggtaagaagtcaaaggaggtgaaggaaacgccatagtggagaggaaaagtgagacaggataagcagcctacaagggaaagtggtcaagtagataccaccgtacgtaactggagcttaactctgctggggaaattctgagagcagtgtaatgcaaacattacagatatttcatcctgtggatgagggaactgggacatttatacactttgtgtatatatactcacatcagccatgaagaaccattcctagccgggcgcggtggctcacgcctgtaatcccagcactttgggaagccgaggcaggcggatcacaaggtcaggagatcgagaccatcctggctaacacggtgaaaccccatctctactaaaaatgcaaaaaattagctgggcgtggtggtgcatgcctgtagtcccagctactcgggaggctgaggcaggagaatcacttgaacccaggaggcagaggttgcattgagccgagatcatgccactgcactccagcctgggtgacagtgagactccgtctcaaaaaaaaaaaaaaaaaaaacccattcctgttcctaaggtgggaacattaatcctccagtcctccaacatttctggcctactgtgcaggtagcaaactccaaatatcacaaagagcttgcaagcaaagaaatacagatgccggtggtcaaagtcagtgatgggcactcaagtcatagggcctgggaacatgagtggggagctgacagcatctgtggattgcctatttaatacccaatcacccactcttgtagctgttgactctgatcactttctgatcattttataccatctgtctatgtagaaaagagccctatccctagctcaagagtgaatcctgagtgatctcagctaatcacatgaatctcatcacccacttgcaagagtttggtttagaggtaggcgtgtgtccagtaagacatgtggatttttcttggaaaggtttcctagcctaaaacaagagacacgcatgaagaaacagttcttctttgcctgtgattcctggaaccactacagccatcttgcagcaaggctgaggatgagagtgacccttaggggaggtcagacccaaaagatgtggagggatgggcctgacattctttacctgggacccactctatctatggatgccttattatgggaaaataaaatgtcctgtcattgaagctgtttgacatgggaatttttattccttgaactgaaaatatcatgatggagatagcacatatgaggaactaaaaagaaggacaggctggctggagtggggtgaacaaagggaaactagggggttgtgttggattaattttcttaatctttcaaaagaaggaatgtgtggaagtgagcactgagaatgagattacaaatagtcctttcaagatacgtttttggtacttttgaaagaacttatatactgatcatttcatttgaccctcttgacagcctgggaaggacaggaatcattatctacattttataactgaggaaactgaagatcagaaagatttaatgtcttgacagggcctaaactggaagtcaggagcttttgattcttaatccagagcttgcttctgtcatgacctagggaaggatgagaggaggtcacctgttctgagaactccttcaagatcatggcctagatgaagcaaatgagcagcaagtgacttgttcagtgtatctctaaaccatgtttcccaaactgtactgatccactttgaggtgacatgctggcctctctggatatctcgcatgttctttggcaaccaccctctcatattgtcagccaggtgattggtggggttggcctttcccacacttttgggtaggcacagaatattacatttgtgtggccacagtgattggctcaaggaaagacatgatgactcctttaacactatagatttcattcattcgtttatttcttcttttaatgacatagcaattgcatgccaagctttcataacaaacgtttagcaagcaccctggatatgccaagtatacctggctgggtgctggagacacaaagatgaaaaaggaagacagaggccctgcctcagaaaagcttataattatctgagaaacacagactggtaaataaatactcaaaatgcatattactaagcactacaatagaaatgtgaatccaagggctgtaggggaaagacctctacctaaagtgaagcaggggagtctcacaggaaaggtgtctctggatctgaatccctaaggataagtaggaattcaccaacagagaaaagaaataaggactcttgggacaaaatgactggtacacgcaaagacacagcagcatgaagggaacgacagagaactcttaagtgacttagcgtgggtgagcggtcaagtgaggatgtgaaaaggatagaggatgccagatagaaaagaaaaagcctggtcctgatgcttttaagtgtttttctctaaactttagagagactggacttgatgcactgaggtcctaactggggaaaggacaagattggatgtgtatattagaaagatcactttggccgggtgcagtggctcacgcctgtaatccaagcacgctgaggctggcagatcatgaggtcaggagtttgagaccagcctggacaacatagtgaaacccatctctactaaaaatacaaaatattagccaggcatggtggcaggcgcctgtaattccagctacttgaaaggctgaggcaggagaattgcttgaacccgggaggcagaggttgcagttagccgagatcatgcccagcccaggcaacagtgcaatactctgtctcaaaagaaagaaagaaagagagagagacagagagagagagagagacagagagagagaaagaaagagagaaagaaagaaaagaaagaaagaaagaaagaaagaaagaaagaaagaaagaaagaaagaaagaaagaaagaaagaaagaaaagaaagaaagaaaggagggagcgaggaaggaaggaaggaaggaagaaagatcactttggcattccccataaacggtggatggcagggaaaccaattaggatactagtgcaataacaggaaggaaatgcgggcggcagtagttatgtaaactgaaaagagggggccagaaaagagcctgtccaagagcagaatcaacaagccttggagatgaggtgagggaggcggagtttgcaggtgtctggcttagctaactgggggagcgatttggctgtctttaaggggaaatcaatcttgcccaggatgggggtgaggaatataacatgatgctggcctattaaatgcagatatctgtggagaattcagaggagggtgacaatcggcagctgacatgaatatagaatagacaatatagatgtgggagcttaatccctataggtgatagctgctaatattagagtggatgagattcttcgaggaggctgttttatctttacttttgaaaggaaattttttgaacgtgccatatataaacaaataataaagaattaaaaaatcaaggcatatgtaaggacatctctttccactttcagataaaagtgtgaactcgatgttgtctttaagaaaaaaaaaaaaaacctttgttgagtgttttttacatggagtaatatgccagacaaatgcatttgtactaaaagctttgtgaaggacaggcagaactttttaccctttgtggtttcacaggttttgacactttggcgtgaatgggggttttgctcttttcgctaaattgctcctctccagtatgatcaagcaaaaagaaaaaacatcaacattttccttctttaaaactccagagtaaaaagaaggtccttcttcctgtgttctgcctagataggcaaggaatggctagatgcagatgttgggcacccccgggcagggcagggtcagagtctgaggcactgtttcctagtgctgacgtgtacatggtgtggggtctgatggtctggggtcaaatcccagctcagctgctctcaacttgtttgtccagaggcaaattcttgcagccacttaagcctcagtttcttcatttgaaaaatggaaataataatagtgctgacttcaagaaaaattgcaaggatcaagtagaataatgcacataaaatgcttaacagagcccccggcatggagggagcactcgggatggggaagctgttattactgtggcaagaatctaggaaatgatgggaagaggcaatgcttgtagagaccaacatgttttcagaacaaagggggaaacatacagcgtgaaaacattgtgagagagcacctacgtcctgggcgagtataatagtaaaactgaacttacattgctcaggtttgtcaagtattttactgagttggattttaaatattgtgtgtgtacacacacgtacacgtgtatttattcttctgatactatttttaagtaaaaattgttttaaatcaggtctctgaaataatttggggcaattattttaatttgggccttaactgtggcaagatagggattgccacagttaaggccctaaaggaaagataaagtgacttccccaaagccacacaggaactcacacattcagagtctgcctcctgaaggctgctgtagtactcgctctgtctggctgagtttgccacattctcactcagccttgtgaaacagcaggactcctggcctttaggaaaggaaaatagaagccttaagcatgctagaaactggcattggtcataaagctgagtataagcacagcaagtgacttcacactgagcaaaaatgccaaataaagcaaagaaggctgaggtcctcagggaaactcaaggagaattgaccattcttgacagatggatgagggggatgcatcacgaggacatagggtactcagaagctgcctctttctgggtaagttttgagaccttccttagatttctgttgcccaaaagaaatcaaggagctaagcccctcttctgctacatccaatagtgggtacgccaaagagagatgtgatccttcactgcctagaacagcaagctgaccttctttaatgtgatgcatttattttctctttcactgcttattaactcattcattcatcctcatattttcccacttcatccaccaaagacagtggaactgagtcataaataagaaaaataattaaagaaatttttaaactccaggcacttttatttagtaggcactgggtgaagctgttgctatactgcacttcatttaatcagcacaacatccctgagaggtaggcactaccattattaccattttacagctgaggaaactgagactgagtaaagctcagtaagttatccaaggtcacacagcaagttgtcgatctctttagctccaaagccctgtataatcttttccatctattctaatagcttgtcactaactagtataaatgatcaagtagcatctatgaatgcaaagtcaaattggagttgacctggctagtttttggtgtcttgtttcttcttaagtttatttgtcttacacagagctgatagaggcagactaggaatccttttgcagataaatgggcttgatcatcttccctctgggcttctctactgaatttactttaaatataatatggcttcttaaaaaatggcagtgtgtcaacctccgaaaaccaaaatcttacaaactcagcacccagaaggtgcattgctctggccttcctttcatcttcaaccatgatgaaaaatcccttatcaaaattcagtggttgcacctgggtttcatcattgcttttcttgcaggcattttctcttctcagtggtttggagacagttatgactgtgtgaagtcatcttctcttcattgttgtgtggctgttcttcagtgtatgtctcctccagaagttcagaggacacctgtcaaagccaagaacttcctgctttctgtcatcataagtggggctgggaaatccctgacaccttgaagaagtcctgggctgtcaggagtcctctgacccttattcatgagagagagattatataccatcttctctcagggcagtggttcccaaacttgagcatgtggcagaatcacctggaggcatattaaaatacaaattgctaggcctcacccccagagttatgattcaaaagatctagggagagattcaataatctgcattttctaagttcccaggtgatgcttattctgcaggtccagacatcacactttgagaagccctgccccaatgcctcatgtaagaggatgctaatgaatcttggacactgtattactagtttcaatcaagaaaggaaccagtgttttgggtaattatctggagaaattgaagaggacatagaaaacatctggtgaacagaaaaaagttgctttataaagtttacactacaaaaaggccaatgtacacagctttcagtttatgctcttggtaaagattttgagtgccaaagttttttctcccattcattaaatgaagttaaatggacttattatccattggtttccttcctgacataagtgaatgttaggattatgtcaggcacagtggtccctgaaagagtgggcagaccacaagctattgatcaatgggtattaggtttagtgtcgggatgagccaggttgctgaacactgggtgttatgatgatgctgagggtgctacccaaactcaatgtaatgcccacagtaagattccacaggttagcattttgttgcatactatctaatatcctcatggtataaaattgatgacccagggaagtcaaatttacacattacagcagggaagtcattctccttctgcttctcacatgcaaagcttgcccttactttgcagaattactgcaagcagaagccacgtgagtgatgaatgatgtcataagtaatcacatcatctcagctcccgtggactagataagaaatcctgggaagtagtgccatttttttttttactgctgtcttttctgctcataggcagctgggatttaagtagggtggttgtgggtgagaaggccccatttctacagggagaatataattaattcttgctctttttttctaacttctaaacaggcaaggaatcataactttggatcctagaaacatccctctgctttctctggagtcctccttttatactttgaaatctcctttagtgtcctggattggagtcatgagtcctatgtcttgatctgccatcaactctctgtatggccttgggcagtttgcttaacctctctgtgatatggtgacttcatctatagaacaaacattttgcattgattcatctctaagttccttccagttctaatagtcaatgattctcattcatctctttccttttcttgttttcgaaattcagcatctctccacacattctcatttcttttcaagacactctctcccccttccactaccctttctcatctcatctcatctcagcatgaagtatttatctcatgtaaagtcatagatgtcgttcagtcatagatggtatcattctacctacctggtagcccccaggaaaacaactgtatttaatttcaaagatagttataaaaagatgtatttagtgacaattaacacaggcccttttccatatacactcacattcattagtatgatacttctacaagctcaatattggtgcagaggagggcaagagctttggagctggatgacaatttgcaaggactagtgtatcaatgctaaaaaaaaaacagctacaggagcctgtcctgatcctaatcctttaagccaggctggtgcagggcacccagcccccagaccaccctatcagtgtgccctgggcctacctactcatccagggagccacttatgccacctgggttggcaggtggcataaggcagtttctcaggacctctcccacagctcccacttttgttgtttccaaccagctttcatttcaatcccatttccaccagctcagaagtactggctgtaaatctaatttagatcgctatctccatggcatttacacatactcttccaatcattcagcccttgtgtttcccctacaaatgctgccatgctgcaccttctcgattgtcagcatcctggctgctttaaataaaaatgtatgtccttgtcctagccctaaagcatgaaacactccaacactataaactgaattcatagtatggcaaacggccagtttgttgaagtctaataaccaaaaagccaattcacgaaataatatattaacccccaaaccaactctcttccaattacttttatttactaaaaactagatttcttgaactattgataaagtttactacaattattttagaagttgtgaagatttcgggaatatttgttggtttagactgcttatgaaatttagttattggttatcatgaatgtttctgaatatcaaatgtagccattaaaaagctaacctgtcccaacaggggattaaaaatatggtcctaactattaaagtacccatttctttacaggccaagagactgggaggatatatttttaaatgttaacggtgatgacatctaggttgtgggattatagatgatgtaggaaattacatctgtgcttttgtatttctaaaaggaaactatatcacatctatgattagaaaaatattataataaatgttaggcaaaacatcataataagacccgcatgctgacttcaaagaactcacactcaggtggaggagtaagacacgtaaacattgtgtagatttttaaacaaatgtggaagaactttaaaacttgtaaagaattctaatttgggaaatttacaggaaatccttttgggggaggcatttgctgaagctgtgctttctgtgaggtttttgaaagatcaatttgcagatgttagtccccacccctttgtccacagggaggagagttggctgggctaatttgattctgatcttttgaaatattatttttgattacagaagagacccaggagggcttggggcacgaagaacaaataagttaaggaacatctctggaactgaaaatgaggttctgagattcctccaaagtctagactcctcatttcaagctttatttgggaaagagaatagttttactttaaattaacctaataaagttgagggggaggaaaacaataactgcttggtttacaaaagcattcccacgagtcttggtttcagattcacagacaaaatgaggccgggtatgaattaattagctttgttttgcatggaacatgagccgtcaagggcccttcccatgtgagcacaggtcagcaaaggtgcatgctcttgggcctaatctccatccaggtaagcccagggtgggctgattactcgtgcttccctcactcttcttcagcatctgctcatcaggatgctcaggccagcacacgttttcaagccagttatcagaaacaaaggaaaacatatcccccaaacttctctctccccactgagattcaaaccagtaaaactggtattacagtgaatgtgctgacagggcaccagtcagcaagaccgaatcagaaaagcttaaaattgagaagacaaaagcagtgctgagtttagccaaccagagcaggcatctctgtgctgctctctggtgctcctggacaatgcttaaatactctttaagggggaattcacttttacatatcaggtattgtgagaatgatagggtaacctatgactcagtttgcccctgcctgtccggtttacacttactatcatggcttaattattaacactgttccctctcactttcaaaagtgtcccaatttggacaatatattttacgaccacttgatgataatcattttcatagctagtatttagtaagagctgatcacatgccaggcaatcatgagcttggtgctatcaacactatcatcatcattattatcatcactaggccaagattacatgcctcctgaagtggcaaaggaagggcttaacacctaacatttggattcagtcagagtgctaagctacttttcccttacctttaagctacattacctctgagcttttgttttataaacttaatgagaaaaagattcttgtccctttatgaatgccccaggtcttcccactgacttcctccttggttgtcaatcgaagggaagaaactgattttcagggggtcttgttatatctcagatattatgttatgtgaagccccgcttgataaattatgaattaggctctgggagctcaactgattcaccaaagagtacactgacagtaagttgcagagcgaaatttcaaacctaagttgttctgatttcaatacctgccttctcattatactaccttgcctactaagccactttcaatttctacaagcctgtgtaaatttgaaaaggtagagtagcagttcttcccatatgctgtcactgtaaaactgcccacagagaggataaaagtatccttcctcacaagttgataaattgactcctatatctaaaaagtgtctttttcccagctcaggcagacctgtaacatctatctgcaaatggacactccaccaaaatactcttggaccaaaaggtctaagaaatgtatagcagttagaccccatctttcccttgacatggatctattgtttatatggcagttaagggtaacaataatctgaaaataactgatatgtattcaatgaataatgcatctatctaatgctctcaataataatcaaaagctaatatacatgtactcacttattcaaataaatatatatggattctttatccacttattggaacttactatgtgccagacactcttgtaggcactgcagattcagttgtgaacaaaggaggcaaagccctgcctcatggagcttacctattcctacatgatacaataacagataataatgatctcattgaaagaaagcacacatgggataagaaatagagggtggcgggaaaggactgggtgctaatttaggtaggaatgtcaggaagtcagaagaaaatgtaaaagtgtgggcatgagccatgtaaagacatccagaaaagtgttccaggcagagggaagagcaagagttcttatattctgccagaccctatgctgaaagcttcgtaccaattatctcatttaatcctcacaaaccccctgagggtaagtgtcattatttcttcattttgctgctaagcatttgaaccttgaagtaacttgcttaggagcacacgattttctaatgagggaggcatgagttaaactgagccttctggctctgagataacatccccacctcaactactaaacagttccatgctttggtcagtctgcaacaacctctttgccagcacttttaacacaagatttagagaatggctgattgctgagaaacaacatctgcaaagcctgcatcaccaatggatccacagggatagggcatttaaatgattgggtccccacgttcaccagatacggcactctagcaactgctgggatctcttgctgctatgactctccttcagctctgttagaggctgtgggaccagcatcccaggctcttcctccggacacccaagaaattctcccacatgacgtcagtttaagccaagcaagaattttccgtccctccattgcattatttgtaggaaatggctttattgtttttctgtatgcaaagataatataggctcattgcaaaaactatttagaaatagaaaaaataaaatcaccaccattgagagataactaataaaaagcctaccattaagagataactactaaacatcctgatatcagaattcatgtaatgtgtccacttaccgtggacattaaggctgtttccagttttttagaattataacatttttatgagtattatattattatgtgtgtatgtatatatatatatatatatatatatatatatatatatatctttatgccctcagacactgattttttttagaatgaattagtaacagtgtattatttgagcattcattttaaggtccttgctataaactgccaaatatccccaaagaaaaactgtagcaacttacactgcccctttcagtgcacaaaggtgccttttttcctgcatcctcagtaacacctccaacttttcactttcttttgaagcttctatcaccacaaaaacaaggatacagcctctgtcctagttgaatgtccccccacagagccttcgccatccccagcctgagcagagaagacacagaggagagtgtgtcatccctcagctcccccttggccttggggactggtcccatcagaaggtttattcagaggctgagggtacagtgaagacaggagacatcactgtggttctcagcttggaagactgcctcactctcacacccttttctttctttatacattcctccatcagctcctgcccttccatttatcatctatacttggagactcttagctcaggactcttctttgagcccagactcatgtattcagcattctctagatattaattccacttgtatgactcacagacatctcaaactcagcagcccaaaacaaagctcttcatctcctcttgccctctccacaccccttgccatcttccccttcctctaatgtgtcctactcactcagtagctccttcttcttcccaggagccagaggtccagaccctaggagcttttcctcatggctctcattcactctctatcccacagcccatcaatcagtcatgaaggcccatcaattcagtgtctcaaatatctctactatccaccccttttcaccccttccacagccaggacccctaagccaataggtgactataattatctctacatggggatttattgaatgggagagaaaagaagaggaaaatagcatttcccaaacatttgtatatgcctgatgctgggatcttgttaatgctcattagatatacaataaacccatggagtagtaccatttcacagatgaggaaactgaggctcagagaggttaatctgcccagggttccataccagggagactatttggagccttatatgtgatgcttgctgtaccattctatagcaagagtgaagctagggggctggttcagtggcccttgtagtggtttgagtaagagggaactctcctcaatggtaagttcattgaggataaagagtgagtgtgaatttctttgtgtatcttgtaaggtttagctcagggcctgatcaagtcctgcctctgtcatttatcagagacaggagagtttagcagttaagggaatgaactctggaactggactgtctggattcaaaccccagctctgctaattactggctatggaaccttgagcaagttactcagctctctgtagtgggctaaacagtggcccccaaaaatatatgtccataccctgagtcctaaatcctgtgaatatgaatttatttgaaagagcctttgcagatctaattaagtaaaggatctcaagacgagaaggtcatcctggattaaccaggtgggccccaattctagcgacacagaggagagacagaagagaaaaggaccacatgaagaaggaggtagagtgaggcagccacaagctgaggagctgcagcagccacaagatgctagaagagacaagaagcagaatctcccctaaagcctctggagagagtgtggctctgccaataccttgatttcaaactttttccctccagagccatgagcacatttctgttgttttaaaccacagagtttatggtcatttgttatggaggccctagcaagtgaatatatttggtcaatgaaaagagtcaaactatgtaaaatatttgaagggatttattctgagccaaatatgagtgcccaatggcccacgatacatccttcaggaaaacctgagaacatgagcccaaggtggtcaggctacaacattttagggagacataagacattaatcaatacatgtaagatatacatcggttcagtctggaaaggtgagacaactagaagtggggtggggggcattgggatcatagatagattcaaaaattttctggttggcagtgggttgaaacagttaagttattgtctaaagacttggaatcaatagaaacgaatgcctggattaagatacggggttggtgagaccaagattttatcatgcagatgaagcatccaggcagcaggcgtcaaagaaaagatggcaaatgtttcttatcagacttgaagagtcttaaagtctatgttgatgttaatgctggtcagctgggcctgaatcccaaaagggaggagggtataatgaggcatgtctgactcccccttcctatcatagcctaaactagttttcttaggttaactttggaatgcccttggccaagaggaggaatccattcagatggtcagggggcttagaattttaatttcggtttacgattctgtatacctcaattttctcattcatacgtaagcttataatacttaccttgcagagctgtcatgagaattaagtgaatcaatatacataaggcactttacagcggtagctgtcacataatcggtgttttcaaagtagtgtttattatgaccctttaatagttgtgtgaccttagttatttttgagcctgtggtctttttcccttgaaaaagtaataacaaaaatacttagcctaactatagtatctcaaagtgggagtttgcctctttcacttaaaaacggtcaaagaattccttcaagcatcttctgacctatgaactgctaacattcaggtgtcaagtctcactgaagacaactcacaacccaccaaaggcagtgattgaaaagataccatgtgcccttgacccgacaaaatgctctggccaggacattaggtgctaggggatgtgggtccttttctctttctcctggctgccacctggtgtggccgggggagggagatgagaagcggagatgggggtgaagtgtggggcagatggcctctgactaataactgagctgggtcatttgtaatgatgacaaggcattacccaagagatgaggcaaaggtgtataattaatacacaagcagtccttaaaactctctctgaaaccctccttccattccttcccttgctaatgaagtcagagacagggtaaaagcctgtaattacacttgaagtaattagaacgctgtgaaatggaaagcttaagacaggaagctcaaactaatggaatacctattgctcttgttattctgactcatccttcctaggatggtgcttttgtaggtctccactggggagctgaagactgtactgaatttgcataaaatgtagacacacatgcacatcaccctttccttccccagagtggccaagaaagtgtcagcattgtgccttcctcagtttctacaacttttacctattaatgaaagaccaaatcagcagaacagattaatttaaaagcccttccaaagataatttttaaaaatctgagcattttatatttaaactttttttacatgcaattctccctttctagctcagtgcttctcaacatcaatgtgcctgcagagcacctgagggtctccttaaaatgcagatttggattcagtgggtctggggtggggctgagattctgcatttctaacaagctccccagccttgctgctgctgttggacgggggagtggtatacaatgtgagtagcaaggataaagtccttcttggtcccacaagtgacttcactttcctccacagcaatgattccaaacttctcatgtagagcttgaaaaatgaataaaaattttcaattgaagggaaagaagagcaagtgaggaggaagagtggaggaagaagggaaaagtgggtgggaaggtaggaagggagggagggagggagggagagagaatgtgtgtgagttcgtgtatgtgcatgatcaggtgtctcttcttataaggacaccagtccaatcagattggggccctacccttatgacctcatttgaccttaattatctccttaaagtttttatctccaaatacagtgactctgggggttacagcttcaatatgggatacacaatttcatccataacactaagtgaccttagatgaactccttaatttctctaagacttgattccttcatcccaattgcttggagacaagaaagagttaaatcattaaatgacaagaaatgatcattaaatgacatttcataaatgatcattaaatgacaagaaatgagttcatctaattagcattaagtgttccacatatcatctgtcacagaataagtgtcttggttgtgttcttccagacacagtcaagcattggagggtaagtagattatttgtgaggtgaaggaaacagcaggagagaaaaaagagaagtgagatagcaaagagaaaacagccaataaaataaagggtgcattagttaacaaatcaccactgggagaaactggagcttcatttcactgggacaagtcaggcacccatattgaacaaacacccagtgtcagccctcactactgagacaaaagagccgagatatttatgtaccaaagaccatcagtcactggttgagatctgcttccaagggatgactacctccccacttccatcttgctgtgcttgtggatagtagccatggataccagaggaaactttcaggcaaagagatgcctgaattggctgttggaagccctaccagctctgcaagagggaggcctgggaagttctgggcagtttttccttgcctgctacagtgagagaccaggaaaccttagttctccgtagtggttggtcctagtaattgtactaggagtttgcaaaacactagagagactcctgtaccaaagaaatctcaggccaaacaagtgtaaggaatgcttgtttcatgggattcacaactaaagctctgttgaagtcctgtagttgaaatgttaaactttgtataatcctataaattccaaactcatttacaccaacactttttcaaataatatgtatttaccttttaaggaataaaagttctataatgcatgttttggggctatcaaattaaagctagctgagatttcactacattgtaagatgtttttaatctgtttctactcaccattgtagcctatgaacagtaactggtacctagaaagtattcaataaatatctgttattgtaactgttttaaagaatataaaaaaaattctgaaaatattttcaataaaaacagcctcatgaaaaatgactctctagttccaaaaatgactgtttcgaaagacttcggaataaagttcagctgaatataaacttgttgaaatactgagcagtttattctccttgctttgttcccacttaatgaaacagtgcatttttctaaaattgaagacccatgctgttagaagccattgtccactttgctagagaagaaccacttctccccagatccgtgggtggatgcagataagagggctaatggtactaaggcctctctggtccaaccttgctaaaaagagtatttcaacttctaaatcctccctctacacttcacccttttgttgaatactaaggtttgcacctgtgaccccatcatagggtataaagaatcaaattaaggaacttctgacaaatggatcccttttaaccttgatgtcaggcacaatttgctatttgttggcctcaaatgtcagctgaagccagggtgagagtccttgtgactctgactttctcatcttctgtcaagacctaaagcatttttgagctgggtgcagttgctacagctgcagcaaagtgtacatgataagtgggatttgcaacaaataggcttttctctacagatcactgctccagttgggcttctttgctatttttgcccaactgtcctgagaatagcaacatcaatggcaactcatttcttgtccatcattattacaatgaaaaattcaaaaccctgattattactcattccttggagctgagatggaaacctcgaggctgtaaaacaccacttgtatacccaaatgcccatttcctaagaagggatatttcctgggaaattgcttatcttcctagcatttgcaaaaggcaaaagctggcatacagtagcattttcttcattccctgcaaatggaacattggtatttctagataagttaagagtgaggagagagaactatggccatccaggttctcttgggattagtctcctttactcttccttgaataaagataatgtgaatcttgtaagacactgtctgtaaaatggtctacccacacctgctaatgcaatgagtgggctattatagggccgagagggttgttggggtctcctgacatcaggggagtaggtgaccaatgcggatgaatcacaatgacaatggacattagtatttctgagaccagatttgtttgggaaatgggatacattgcctttctttagtcagatgttgtcctggctactgcttacagatgacccttgttttgtcacttactcatgtgtcttccccacttcccttgctggaaaaaacgtgcagagaaactgtaagctccgtgaggttagacattgcatcagattttacttaccactctattcttagtgcctaccaccaagtctagcatacagtgggggccaaataaatatttgtagaatgaataaagcatctgtaacataatatgtactccttaagtgagagtttccattgctacattgctatcattgttgtcatcatcatcacaaacatgatcatgatcatggtcatcattaccaggtgatttttttacagaaatattttctcttcagattatagcagactgaacatcaagatctttaaatctgcttgtcctagggaagttctctggacttcttgcatttggcactagtagagacttggtattttcattgctgtaacacagacaaaaataaatgaaaatttcaaagaatgagtttacctcctggcctttcatggtgatctcctttcctgtctttctgtgaataatatgtgtacagtatcattgctctctgctaataaaaaattacttcaaaacttaaaaaaagtacttcaaaagcttaaaaaaccaaacatttgttatctcagttgctgtatgtcaggaatcagggtacagcttttctgagtcctcttcatatatttttgtctctgtgttactgcaatgaaaacaccaagtctctactagtgccaaatgcaagggtttctcatgaagctgcaatcaaggtgcagttatctcaaggctcaacttagaggagaatcttcttccaggcttacgctcctggctgttagccagagacttcagtttcttgccacatggtctgtctataggactactcacaatctgtcagctagcttcctccagagcaaaggctctgagagagagaaagaatgagagatagtggtaagatataagatataagatagtgataagagataagtcacagtcattttgtaacctattctcagaagtgatatcccatcacttttgtattattctattttttagaagcaagtcgctgggtccatcccacacttgaggggagaatattacacaatagcatgaatattatgaagataggatcattgtggaccatgttaaatagaagcttccagccacaatggatgatgttgttccctctaagcatgagtgtagcttcaacttggttcttttttttttcttaattgtactttaagttctagggtacatgtgcacaacatgcaggttggttacatatgtatacatgtgccatgttgatgtgctgcacccattaactcatcatttacattaggtatatctcctaatgctatccctcctccctccccccaccccacaacaggccccagtgtgtgatgttccccttcctgtgtccaagtgttctcattgttcaattcccacctatgagtgagaacatgcagtgtttggttttttgtccttgcgatagtttgctgagaatcatggtttccagcttcatccatgtccctacaaaggacatgaactcatccttttttatggctgcatagtattccatggtgtatatgtgccacattttcttaatccagtctatcattgatggacatttgggttggttccaagtctttgctattgtgaatagtgccacaataaacatacatgtgcatgtgtctttatagcagcatgatttataatcctttgggtatgtacccagtaatgggatggctgggtcaaatggtatttctagttctagaccttttagcccttttctcctttgagaatcatgggttgccaaccaatcatggcttcaatgccttgtcaaacttctctttcaaaaaaggaagaaagaggaaaaagagaatgggacaagttctgctaggaatagctttcagtatgatgatgattttagttgtcattgcgcaggtgcattggcattgaatcatgaagagaaccgcaattacttctattgacttgtctgagcatcaattttctgatgacttactttatgacttcctaatgaatatattaaaaatagaactctagaagttatatttagccctttagttcctttccctccctgcaccccatcccccactttgcctggaggcttaatgatatatttgagatcattttgaaactttatctactttgtcttaacatacatgtttaaagttgtctgtctaattttaatatacatccttcatcaacaattaagccacctcccaattgactgcattatctgtaattcttcactcactaactctctcatatcacacaccataagaagaaagagaaaagggaataacctatattaggagaggctcattgacaaaccctgaaatataaattgacacaaacgtgaatgcagagttttgtaaaaaaaaaaaaaaaaaaaaaaaggtttaaaaaatagatctacagttaaatgactagtatctctaccttttgttaccttttgtttccttttttgcagattgtttcccagagaaagctgtccaaatccttgctgaagcatgggaacacagcagggaaatcttccatcacggtaagcaggcactccctaagcagctgtctgcctgagtggagagcctgggcggactggccagcccaaaccagacacttgggaagcagactttctgatattgggagttggtgccacaactactgaactattgaaatcactcccttatttttctttctttctcttttctgacaatacaattttgatccttctaactctaggaaaaataaaaaaggaaaagcatttgaaagtaaggttatttaattctagtaagcacttctgcaattgcaagatagattttagtggaggagaaagatgtagttgttgagcacagtgagattacggaattgtctagcattttcacacaatcaaagcttcaaagctacgtgtcctcgtctctcatttattttgagaattaaaattttgctttgatagcatttacttcaaggtttggtttgtttcctgacaaacaaagagctcagcatttaacactcctctttgatataatagtttggaggtttactgtgtgattcagtagccactagccacatgtgattatttaaattttaataaaactatttaaaattaaagtaaatattcagttccttaatcacactggccacatatccagtgctcaatagttacaagtggttagcagctaccatatgggacagtgtagattataaaacatttctataattgcagaatgttctattgggtaatgctagaagtatttctaaataagagcttacatttttgaatggaatgcctggtatttgaaagttcgacatcttctattaagagaccttgaaaaaggtagaggatgttgtccaaccatttggatgtatggagtgaaaaaagaaacaaacaaaaagacaagcaaaagaaacaaggtagaaaaaactacaaggaaattctgaattgctagagaggcaaattgccagaaaacgaacctcttgagttattttgaacattcctttttaactagagagaaaccaattttttttttttttttttttttttgagacagtgtctcagcctgtcacccagactggagtgcaatggcacgatatcggcacactacaacctccacctcctgggttcaaatgattctcctgcctcagcctcccaagtagctgggattacaggtgcccaccaccacacccagctaatttttgtatttttagtagagatggagtttcactatgttggccaggttggtctccaactccttaccttgtgatccgcccccctcggcttcccaaagtgctgggattacaggtgtgagccactgcaccctgccctgatttttttttttttttttaagcacaggaaaaattcaaaagagctgtcagtgaaagttgtggccattctcacaagaacttacctgagtttgttgcttgaatattttaaatgacactgtcatgttaaagctttttcttgactgccatcttcagtcatgaatcaaagtgttctttgaagacactgatggtgctctgaaaagctatggacccacgggttcactcccaaagcccacaaaaccagtagatccaggtatgaatttgctatggttctttctcaaaagaacaaaatctcatcttgccatattttctctgagatatcctgagattttctttctccacatatccaagaaaagtttgatctttttcttttctttcttttttttttttttttttttgagacagagccttgcccctctcccaggctggagcacagtggcacgatctcatctcactacaagttccacctcccgggttcacgctattctcctgcctcagcctcccgagtagctgggactacaggcgcccaccaccacacctgtctaattttttttgtatttttttagtacagatggggtttcgccatgttagccaggatggtctcgatctcctgacctcgtgatccgcccgcctcacctcccaaagtgctgggattacaggcatgagccactgcccctggccccatttaattttaagtatttaaatgctcctcaactttgagtctttagatcaaaacattggctttaatagcttctagaaaacacttgaaaaggtgcatgaaattttctaggtctctgcagatggtgaaaatcataactttcatcagttttccaaaggtgtctgtgatcacaaaatacttaagggtcagtaatcaaatgaagtataagaggcattaaggtggtaagggacaaaagagaaccaaatgaaaaatacaaatatgatagttcttgggttatcaaccagttctagagtttttcctatatacctggactcacaatctctactctcagttgttcacacatttttgggtctatctgtcttaaggtagccatcttagctttaagattaagtgtaaataatttaaattttccaaaatatttggaatattaccagtgactattgaaagtatatggacccaactcataatggaattgttgagctcagatagaaaagaggtaaaactgaattatcagtatcttgatataagcaatttgataagcgtatccatgtgctgtggccacagaatacatggtaaatcctaacattatttataaaggttttaacttatctgcaacttgactggcttctagatttttgttgcttttgttgtcattatttttctcctgactttctccaccaatttctgctccaaggctttgttgagagtcactaactattaagtattggaaaatgacctattatgagaaagtcttttggacagtaatttcttcacttataccaaaatctttgtcaggaatggtctgtacttgggtgttagggcttaaatccttacgtatacccatatcttcatctcagaaaacccagggacagtcttttgaaaaataggaattagaaaaatttgacataaaaactagtttattccaacatttcttgttggtctcactcaaaaagaaatattgctgtttttccttctctgtaatttaccaaagggagacattgtagttaattatagaaatactatccaatgccatgtgacctttaaagaaagaagctcttccaaactgctcttctattttttccttcagcttgggtcccatctcttatgttctcttgctcagtataaatggtgtctagttatttaccattgtctattccagggagttcccttgaatacctagaattgctgtgctgtagtcactagggttgtggaaaaactctttgcccaacatttgtctttgttgagttttgaaccaaacaggaactaaatttgctcatgggttctggagctaaggagttcaccctctattgcagctgatgtgtgctttttcctttaggtgattgctgaagaattatctggcaatgacgactatgttgagcttgcattcaatgcacggaaattggatgacaaggtaaagcgtttggcattaaccttattgaaggaagtaacaaagctagcacacagtttaatcagatttccccctgcaactatttttccctttccacccacattatcaaacagatccaaaaattcagagaggtctacaaagtaaactttcccccacattaaagatcaattaatgagaaagggaagggactgtaattaaaacaagacaattctatgacaccaagactgtttccaaatgccaccggtgagatgtgcacaggtaaatatgatttaaccccatttctagggacattctaagggagaggagaagatatgaaagggaagaaaaatgacatttattgagcacctatgtttgccaagtacaggtttaagagctttttatgtggtatcacatttattcatttgtacaactcctatttatcacgtattaatagtcagcccacttatgcattcactggttcactcttttatttgttaatttgttcattcattcatcattcattttccaaacctttgttgggtgcttgttatgcatgaggtgctggaaaaaaggcatatcaaaaatggacattccactctcacatctgcaacctggaattcatcattgaagtaaaacatacatctaaaaaacaaatgatatagtaataatatatccacaatagaatgtgataagtgatatataatagtgtgtcctggtaaggccaacttattctacctggggacatcaggaaatactttatccttataaactaattatatttggattttaaaagtgtcttgaatagattatatgaaaccatcacagactgctccattcttaacatgagcatgaactaggtgctgggaactgcagtgtgcatagatgtcagttgggagcaagcttttaacttcaccttttcacaactgttatgctccttctccttcatcatctccccaaatttcagaaaaactcacaaaacttctttatagtatcttccctggtgctattataagccactgggtcagtggatagcagttttaagctacttgcttaatggcttataatggtttctctacacttagtatgctcttaagtacctctagtttgtcatctaactgatttatgttatagtaaaagggggcgggcttggaggtttgttggaccagttggctttgaagtgtttgagcagtttccctttagtcaaatgaacacttgctcatagaattgaaagagccccctgcagcacttacagtggttctaaatggctattcccaccattggctgtactgattgtccaggaccctggtcattgctgagcctgaatgccccagtgctggaaaccccagttccttcataatgtgactatgtcttgtccagatccttagtaattcagagaacaaatcagaggcctttgctccagtttggactggaagttaaatggtctcagatggaaagagggcaaagttgtagaatggaggagcaaaatgataacataaagatcatttcacacaacctcttcaggaaatgagggctcagcaaggtatgatgatttacccaaagacacaacactactgctctggttttctattgctgcatggtaaacaatctattctgtgtggtaaaccatcaaatctagcaacctaaatgaagaactattccgttatagctaatgattgtgagggtcagaaattcaatcagggttcagttgggcagttctgctgtctatgatgttgatgcaaatcactcagtggtactcagcttgtggatgagcttgtctggaggttctacactagctctacgcacatgcctcgcacatgagatggctgaatggctgggcttagctggaacagtctaccagagtgcctacttggtggtcctggggtagtcacacttcctttagagtatctggcttctcccagagaaagcatttcaagagaacaagggagatgctcggtggccttttctcaccccttcctggctttggaagtcatgcatcatcactgctgctgcattcttttagttgcaagtaagtcataaggccagcccagattctaggactccacatcgtgttagggcagtggcaaaatcatactggagaaaaagcatgtggactatgaacttgtggtggtcatgtttacaaaatgcaaactgccacaatatttttgtgatagaaatagaataaaataatataattatttcatgtcacagctggaaaaatagttcccagatgctctcaaggaggacccttttctagcttttagcattaaacaattttataactatctacatgtttgcagttaaaacttactgtatctagttattgtatgactaaaagtcactataaaataaacaatgctcctaattttttattatgttaatgaatatcatgaaagtcactagtttctacatacacttaaaaattgaagtatgaatatgtaggaaaaatatgctatatccaattcagacggtggttgtaggatgcctgcctggatctccagtcccttggcagtaactctggtagcccccaggagtctacatactttaggtagaaagccactgtctaatccaactgccttattttatagatgaaaattttaaagtttagagatgtggcatgacttactgaaagccacacaggcacacactcacaaaaaaatcagtgcaagagagggactcaaacagattgcctgacaaaatctaagtcttttggagcagagagttaatgaatagaaggtggtttggtctcagaatatggaagacttggaaatgttttcatgtatttcagggaagtaggaagccaggaagaggggaggtaagaggggaggtaagaggggaggtcaggcagcagtcctccaagtgtgatgcatggtcccaatacctttgcaggggaacccatgaagtcaatactattttcataataatgccaagacataattttctttattcactctcattctctcacacatgtaaagtggagttttccagaggctgcatgatgcctaatatcacaacagattgaatacagcacaaatataaggattctgctgcattctattaagctaatcattaaattggtttgcaaaaatgtaaactaataccattctcaccattttttaagtttggaaaatataattataataatttttccattaaaatactatttttgttatgatgtagtaggtttattttattatttttaaacaatgtaaccaatattttaacaatttaacagttttataatatggtaaatattaatacatacaacaaaacaaaagctctttggtatccccaataacttttaagaatgtaaaggggtcttaagaccaaaagtttgagaacccctgttatagggtatatgggaaagcactaagtacttttgcaaaccacagtgacagagaaatgcaccattctttttgacagaaacagtcatttttaatttgtctttcaacagactagcaatcatctccacactcttcaatgagagtgagtacataaaatagcttaggtttgtgataaataacttatttatctaatgttaatgcaattcacttagtagagaaagggactttctaacttgtaaagcacatttgttacattagcaactagtcggcaattaatctaacaagtaagtagagacagaaatgtaataatcactttggaacattcaagctgacaaaggattctttcttttcccattcttgagaaagtattcatattggtgcattggaactaattccgacactggtggtctccacatatgtaatagtaatcattatagactgcattttcagtgttcccatgatgctagtttgatggggtgcaatataagtaaacaaatctgtctctaaagtagaggttggcaaactttttaataaagggctagttgataaatattttaggttttgcaggacacctgatctctgtccccactgctcagctctgcctttgaagcatgaaaacagccatagacaatacaaaaatgaatgaatgtggcagtgttccaataaaactttattcacaaaaacaaacagtaagccagatttggctcatgtgccatagtttgctgacccctactctaaaacaatgtaaaatctctacctgctgtgatgtgattttactatgtttaagtatgcctgcttgaaactgtaatctggtctgcattaatgatagaaaattataattattgagcatctattatgtgccaagtatcaggtgtctaacctacattatccccaaagctcataagcatattcccagaagttagtatctttatttccattttatagataaagcatactcagatcagacatttcccagagtcacaaaattaataagctgtacagactggatatgcctacatctttcagataatttcttctaggtccaatattccattttcaagatcaccgtcatgggtatgaactgcttcctaattgcttatcaccctcttacttagctaaatttcttttatattgaactaaaaaagcagaataatatggtctctgtgttattaaagaattttaccacagcaacacttcagtaaaatgccctattcattcatcttttttgaactgaactgtcccaatggccatcttagtgctaataatcaagttttaaaaagctgaaaattccaaattaaagtgaccacacaattagacccagagttgttgttttgaagctatgaatttctgagcgtacacttgagattttgaggtgcttatgaattatttcatttccatgaatcagatgccttcttaatagtaatcacccctgatatttgtacagttttttacaaaatgccttcatgaattttttcttctattgataatcatcatagtagcccactttttttttaatatttcaacttttattttagatgcagagattacatgtgcaggtttgttacatgagtatattgcatgacactgaggtttggagtacaattgatctcattacccatgtagtaagcataggacccaataggtagtttttcagcccttgctcccctccctctctcactgctctggtagtcaccatcgtccactgttcccatctttatgtccatgtgtacccaatgtttagctctcagaagtgagaacatgtggtatttgattttccattgccgtgctaagtcccttaggatcatggccttcagctgcaaccagggtgttacagaaaacattatttttttatggctgtgtagtattctatggtatataagtgccaaattttctttatcctattcaatgttgattggcacctagactgattatatgcccttgctattgtgaatactgctttgatgaacatacaagtgcatgtgtctttttggcaaaatgatttattttcctttgggtatataccagtaataggatggctgggttgaacggtagttctgttttaagctctttaagaaatctccaaactgctttccacagtggctgaactaatttacattcccacaaacagtatataagtgtttccttttccccacagcctcaccaacatctgttattttttgacgttttagtaataggtattctgactggtgcgagatggtatctcattgtggttttgatttgcatttctctcacaatcagtgacattgggcattttttcatatgtatgttgaccacttgcgggtcgtcttttgagaagtgtctgctcatgtcctttgcccaatttttaacgggtttatttatttatttttgcttattgaattgtttaagttccttataaattctgagtattagatctttgccagacaaatagtttgataatattttctcccactctatcagccacttgtttagtctgttaatagttttttttttaactgtgcagaagctctttagtttaattaggtctcacttgtcaatattctttgttacaatttgtttttgttgcttttgaggacttcgacataaattctttgccaaggccaacatccagaatgatatttcatatgttctcttctaggatttctataatttgaggtcttacatttaaagttttattcaatcttgaattaatttttgtatatggtgaaatgtaagggtcaagtttcagtcttctgcatattgctagccagttatcccagcattgtttattgaatagggagacatttcttcatttcttatttttgtcaactttgtcaaagaagagatggctgtaggtatgtggctttatttctggattctctatcctgttccattggtcttatgtgtctgtttttgtcccagtaccatgcttctttggttattgtagccttatagtatagtttgaagttgggtaatgtgatgcctctggctttgttctttttgcttaggattactttggcaattcaggctcttttttgttccatatgaattttacaatagctttttctaattctgtgaaaactatgtttatagtttgatgtaagtagcattgaatctgtagattgcttttggcagtatggccattttagcaatattgattcttccgatccatgagcatggaatgcttttccatttgtttgtgtcatctatgatttctttcaccagtgttttgtagttttccttgtagagatcttttacctctttggttagatgtattcctaggcatttcattttttctagctgttgtaaatggggtcgttcttgatggagctctcactttgtatagaaatgctactgatttttgcacattgactttgtattcggaaactttgctgaagatcagttctaggagtctttcaccatagtctttagggttttctaggtatagaattatatcaacggcaaagagagacaatttgacttcttttcctatttggatgccttttatttctttctcttgcttgagtgctctggcgaggacttttagtactatattgaacaggaatggtgagagttgacatgcttgtcttattcctgctcttaagcagaatgcttccagcttttgcccattcagtatgatgttggctgtgggtttgtcatagatggcataagcataagatggcttattattttcacgtatgttccttcactgcctagtttgttgagggtttttatcatgaagggatgttggatcttatcaaaaccttttttcctacgtctattgagatgatcatatggtttttgatatgtgtacgttgaaccaaccttgcttcccaggaataaagtgtacttgattgtaatagattaaattttgttgtgccactggatttgggttgctagtattttgttgaggatttttgcagctaacattttttcagtcttcaccgtgtaccaggcaatggactcaacacttcccattcaccaggtcctctaattcttctttgtcactatgaggcaaaggttgatactccttccattatgaatggcaaactaagccttggagaaattaaatattttgtccacagttattcagattatatgtggtagagttgagatttgaaagcagtgctaaagccagtatgctgcgtatagattttcagctacctgaagacagaggccattcttgacctttctttcattgacattttagtatgccctcctgacaataacttcttgcctaattcattcatggtatttaaaaagaatgtgaaataaaatagaaaaagcattgtaatatacaacatgtaaatatgtatacaacaagcaaaagaaatagggtactaaattgtacatagatcatgattacaaaatttttaaaaagaaagacagaaaagtatatgtagagtctagaaaaagatttatcaaaattctattgatggttatggaattttgaattcagttatgggttcttttttccttctttttatttttgtcatctgttttctatatttttcatttttaaataaaagtgatggtaacaaaagttttaaattaacagtaaagagggaaaaaatgagaaagttcttacattgtggttagcagtttttaagtatgaatcataaaaacatcccctgagggaccaacaatctatttaaagaggcaaagcgtgaagttacaggaggagcccaagggcacgtaggaacaagctactgtagcccacatccatagggaaagggagaagagaaggaggttttaattttttaagatgcatgtagaaacagaaactggcctaaggggcaaatgagtaaatgcatagaggtgggaatcagctagaagtgcatctgagagagaaatgggccattttgggggagagacgatgtttgaagggcaagattatgatgaaagccaccattttggggtcttgacaagatgaaggctgtggtaatcttctgaaggcaccttcagaaatagagtagtagcggatgttccagactctgggtgttgtggagcatcttgtttggttcctggttgcatgggaaggaaagcaaagcggaagatagttattcccacctctcatctcctccttctaacatatactacaaagtttctagactggcattcttcactgcagagccaactatattacttttctgctcaaaatccttcaatgattccccctgcctctccaggccagtgcaaagacttcagatgagcatttaaggcccttcacatcatggggccaactttgccagcattgtctccaattcctcccctatgcttccctaggctatagtcttattaaattacttggggtatccccctctatgtctgtgaaaaattcatcagctcccctctcttccctcaatactccttataccttcattcattcattcactcattcactcatttatacctagccctaggttatatttatttgtatacttttcttaccagcaacctagatggtactttggaagactgagatcaggttctatctgtccttatatcttaacatcaagcacaaaaactctgtgatcagtatatgtcctacaaatattttgctgagctgaagactaggatggctggtaaagacattgatagtaaggcaaaatttagaagtagagaccaaacaaaggaaaataacgagtttgactctggcttgcttaacatttaggaataataaatgacttttaaggcaaatatgggcttaattctactttgctaaagtctagatttctggaaaaaaattacttggtgaaattcgtaataaaaatgtgatggtgatgaataaggtttttgctcagatagcctcctatcctataccaggtatccattcacttatttatgtatttattcattcattcaataaacactatgtactattaaaatctagacactatggaaaatgctgaggaaatagcagaaatataaaggaaaataaagtttctcctctttgagaatttataatctactgggggtaaaaatcaagtttttaaaagggatggagataggttccattcccaacaatgaagcacttagttattttacatcactctctcactaaaaacaaatataaacactagaaaagacacaagagacatgtatttgagagtcctgaggcagtgtagatttgaggggccaagaaactggacagaagagaaacccatggaggtgcttaagacattctgtgcagattttccactcaagggaattcctcaaggctgattcgtaaaatagtgtggatagaaagtctgggaagcctagtttaaaaaaatagctactaagaaacagaaactgagcagagcttttggtggtctcatggggctggggagaaaaactgaagttcagggctattgagagagcaaaggataaagactcataggtgcatcagagaagacaagtagtccaacagtatgagtggcttatcatctcaaggcgtttgctaattagcaaaagcagcatagagagaaactgaacaaaaacctagagctaagaaattatgaaaataaacacagcatttgaggttctcacaaataaaaattggcattgaagacttgtcaaggaagaacacccctcgtgaacactcaggttttcagttagggtccttttaggactatacccaaggagtaaaggaaatcagaaatggataggggctttaaagacatttgaagaaattcatcctctaaatagcttaatcctaattggattcaggagacttctccccttataaccacttgctagaagctaaagactcatgtaaaaaccttcataatcttcattacacattgtctactatttaataaaaaattaacaagcataccaagaggtggaactaagaaagagataataaaaatagacctataggtgatccagacattgtagtcattacataggcattaaaataactataatgaacctgtttaagacaacagatacagtgattttcaaagaactggaatttgaactgatctttgaagaatactttgaatttcaactaaccaagtactgactttacaaagaacttagctttcagatgcagtccattctagccaagggtggatctcagggatgaggatcaaaggaagaaagggtggggctcatgatcacaggtaaagagaagagagtttgagtagaactgggcaggaagagaggacaagcatggcctcccttccacatataaaaaataggaaatcaagagggttttcctgttgattaaatattcctgattgatcaggactagatcaaatgcaggaggaaaaacaattcattgacgtttatctattttaggatttcttcagtaaatctgacccatttctggaaatttttcgtatgaatgatgatgcaactcagcagctggtgcaccgaactgaggtaagagtcatcttcagctatgccctcttatctcctaagatgatgataaattgacctattttgagaaactcctttttgtgtgtgtgtgtgtgttgaggtggagtctcgctgtgtcacccaggctggagtgcagtggcgcagtctcgtctcactgcaaccgccacctcccagcttcaaacaattctctgcctcagcctcctgagtagctgggactacaggcacccaccaccacgccgagctaatttttgtatttttagtagagatggggtttcaccatcttggccaggctggtcttgaactcctgacctcatgatccacccgcctcggcctcccaaagtgctgggattacaggcgtgagccaccgcgcccagcctccttttacttcttaatgtctgtagatatcaactaaggcctgaaatcttcagtgtcctcaagaaggttctgccatttttagctttttttttttttcacttttaatcctcaatttagttgtcagaagagcctttctaaccccaatttctattgttaactttcaaaacagacaattagcaacttattcataataaaagtataaatactagctatcatttaatgaggatgtttaggcatctaggtgccaagcattagactgttatttacatgcataattttatttctcacaaaaattcctcacacatgatgatgatgatgatgacccccattttacagttgaagaaactgaactttaaggaggttaagtaactttcccaggtctcacagctaacaaaggatggaactcaggtttcaattgaggttgtttgactctgagcttcatggtaatttgggaagtcaatctgcttccccagggaaagtacatacattgcactgatgtcagtcctatcatatgaacacctgacctttcttagcagccacttagtctagttgtatctccttctcactcttcctcttctttctccaagtggccccaactttatctcttattaccttaccccctactacccactaccacacacacattcaacaactaaccacgatctccatttttcattttattttacttgtaagccagtccaagagggattttgtaggagtgaggtacattgataagaaggaagtgatattcttgtgctgaattacttggagctgagagaagacccagttatgcttgcataccatttgcagagtgaaaataaaaaagaaacccccatgactttcataaggtggtggtgtggttgctatatccccaaaacatcacattggaaattcaatttcctgaagtgacagagttgcaggtgttgttaggggaatgtttcatgtcattgttatgatagacaaaaattaaatagccttggatgggctagctgtggatatcatctgatacaaagttgatatctaaaaaaagtgtttaataaaagaataaataaataaatgctgttaaatataaatagtatgtctattgcatgctatagaacaatgtaattctttggaacttaatccatgaagaataaattgaggtgcagctagcacagttgccctgagtggcatctcattaccaccaccaaaagaggtctttcacccgttaagtttccttatgtgaaacaaacttcttttgagggaaatagagcaagatggccaaatagaagcctccactaatcatcctctaattatcctacccataagaacaccaaattaaacaactctccacacacacacaaaaagcactttcataagaaccaaacatcaggtgaatgaccacagtacttggttttaacatcgttatcactgagagagacactgaagagggtaggaaagacagtcttgaattgttgatactactcctccctcatccgcttggtagtggctgtgtggtgcagatacagaatctgtgtgcttggggaagagacagtgattatgggaccttgcactggaactcagtgctgccccatcacagcagaaagcaatactgggcataactcatcctgcgcccatggaggaagaatttaaaccagtcctagccagagggaatcactcacatcagtagtagaaacctgagttctggcaatctttgccactgcaggctgaagggctctggggtcctaaataaatttgaaaggcactctaagccacaaatactgcaattcctgggcaagtactggtgctctgctggactcatagccagtgggctatgagggtatacaacctagtgagacaccagccaaagtcaccaagggaatgcctgcaccacccctcaggtgcatgcaccaccaaggaatgcgtgccccataccctaagcagtgcagcacacggctccaggagacactcctccctcccacttgaggagaggagaggaaagcataaatataactttgtcttgcaacttggataccatctcagccacaatagaatagggcaccaggcagagtcctgaggtccccattccaggccgtagctccgagacgacatttctagacaaaccctgggccaaaaggaagcctactgccttgaagggaagcaggatccattaccttctgaataaaaatctcttggtccccaaataatcagcagttgtagccaggctgtactcaccatgggccttgggtgaaacacagagacatggtggctttagatgtgatgcagtgcattcccagctatggtggctattgggagatattctgcttgagcaaaggacagggacaagtagaggggacttgattttgcaacttaggtaccagctcagccacagtgagatagagcagcaattgggctcttggggtccccgattaaagactttggctcttgcacagcatttctggactggctttgggtaagagaggagtccacttccctgaagagagagtcctatgcctgggagcattcaccacaagctgactagtgaatatttgggccctgagtgaacgttggtggtaggcaggcagtacttgctgtggtcctagggtggtggtggccaagggagaggctactctgcttgtggaaaggggagggaagagtgggaaaaactttgtcttatggcttgggtactagctcaaacacagtagaatagagcatgaggtagagtcctaaggtttccgactccaagctctggctcccagatggcatttctggacctgcctgggactgggaggaactcactaacctgaagggaaggacatagcctggctgactttgccatctcctgattgtagagtactagagccttgtgtgaacataggtagtagccaagcacggttatcctaggccttgggtgagactcagtgctatgctggcttcacatctgacccagtgcagtccagtggtggcagccacagtggtgctcgtgtcaccccacctttaactccaggcagctcattacagacagactccattggtttgggagaaagtaaaggaagaggagaagggtttccacctggtaatccagggaattcttccagatcttatccaagaccaccactgtacctctacaagtctgaaagagcccagcatcactgagcttgggatgccccctaatgcagatacagtcacagtgaccaaaaacagaccacgacacccaaatccctttgaatacctggaaagccttcccaagaaggatggtacaaacaagcccaggctgcaaagactacagtaaatatataaatcttcaatatccagatatactggtgaatatctacaagcatcaggaccattcatgaaaacatgccctcaacaaacaaactaaataaagcaccagagaccaatcctggaacaaaagagttatgtgacctttcagatagaggattcaaaatagctattttgaggaaacttgaggaaattcaagataacacagagaaggaattcagaagcctatcaaataaatttaacaaagagattgaaataattgtaagaaatcaagcagaaattctggagttgaaaaatgcaaatgacacactatataaggtatcaaattatcctaacagcagaattgatcaagcagaagaaagaattagcttgaagataggctatttgaaaacagaccatcagaagagataagagaaaaaagaatgtttaaaaatgaagcatgcctacaagatcaggaaaatagcctcaaaaggacaaatctaagagttattggccataaagtataaggagaaaaagagataagggtggaaagtttattcaaagggataataagagagaacttcccaaacttagaaaaagatatcaacattcaagtacaagaaggttatagaacaccaaacagatataacccaaataagatgacttcaagacagttaataatcaaacccccaaaggtctaaagaaaatatcctaaaaggaataagagaaaagaaaaacaaattacgtacaatacagctctaatacatctgacgcagaattctcagtagaaaccttaaagaccgggggagagtggtgtaacatatttaaagtgctgaaggaaaaaacttgtatcctagaatggcatatccagcaaaaatattcttaattatgaaagagaaataaagactttcctagacaaacaaaagctgagggatttcattaacaccagaactgtaaaggaagttcttcaatctgaaacaacacaacattaatgagcaataagaaatcatctgaaggttcaaaactcactggtaatagcaaatacacagaaaaacacagaatattataatgctctaattgtggtgtgtaaactaccaatattttgagtagaaagggtaaaagataaactggtcgcatgtttatagcagcacaatttgcaattgcaaaaatatggaaacagcccaaatgtctatcagtcaatgagtggataaagaaattgtggtatttatataccatggaatactacttagccataaaaaggaatgaattaatggcattcacagcaacctggatggaactggagattattattctaagtgaagtaactcaggaatggaaaaccaaatattatatgttctcacttacaggtggtagctaagctaagatacaaaggcataagaatgatgctatggactgtggggacgcaggggaaagggtgggagggggttgagcgataaaagactacaaactgagtgcagtgtatactgctcaggtgatgggtgcaccaaatctcacaaatcaccactaaagaacttactcatgtaaccaaataccacctgcccccaaaaacctatagaaataaaaaaattaaataaataaaatacatttctgtggggaaaagaagacataacactcccttagaaagaaagtataatgaaatacttttatttttctatttattttctttctatgaaaggaaattaaaaaatattaactacaacaacttttcaagacagagtcattaaaataatatataaacagaaacaaaaagttaaaaagctgggggacaaagttaaagtgtagtgtttttattaattttttctttgcttgtttgttagtttgtctgtttctttatgtaatcagtgttgagttgttgtcagttgaaaataatgggttttggtacgtagtcttcaaaagacacatctcacatgcaaggtctcttgacacatataggctcaaaataaagggatggaggaaaatttaccaagcaaaaggaaaaaaaaaaaaaagcaggggttgcaatcctagtttccaacaaaacagactttaaaccaacaaagatcaaaaaaggcaaagaaagccattacataatggtaaaagttttaattcagcaagaagagctaactatcctaaatatgtatgcacccaacataggagcaccctgattcatatagcaagtttttagagaccttcaaagagatttagacccccacacaataatagtgggagactttaacaccccacagacaatattaacaaattatcaagacagaaaattaacaaagatattcaggacctgaactcagcactggatcaaatggacctgatagatatctacagaactctccatgcaaaacaatagaatatacattcttctcaccaccacatggcacttactctaaaattaatcacataatctcaagcaaaatactcgtcagcaaatgagaaagcactgaaatcataaaaacagcttcttggaccacagcacaatcaaatccgaactcaagactaagaaatccactcaaaaccatacaattacataaaaattgaataacctgttcctgaatgattttggggtaaataatgaaattaaggcagaaatcagggagttctttgaaactaatgagcacaaagacacaacgtaccacaatctctgggacacagttaaagcagtattaagagggaaatttatagcactaaaatgcccaatcaaaaagctagaaagatctcaagttaacaacctaacatcacaactgaaagaacttgagaaccaagatcaaacaaatcccaaagctagcagaagacaagaaataaccaaaatcaaagctgaactgaaggagatagagagacaaaaaaccattcaaaagattgatgaatccaggagcaggtttttttttaataatattatagtagaccactagctatactaataaagaagaaaagggagaagattcaaataaacacaatcagagataataagagggatattaccactgaccccacagaactacaaacaaccatcagagaatgttataaacaccgctatgcacataaactaggaaatctagaagaaatgaataaattcctggacagatagatacactctctcaagacagaactaggaagaaatagaatctctgaacagaccaataacgagttttgaaatagaggcagtaataaatagcctaccaaccaaccaaagcccaggaccagacagattcaaagcttaattctaccagatacacaaaaaatagttggtaccattactactgaaactatttcaaaaaattggagggactcctccctaactcattctatggggccagcatcatcctgataacaaaagctggcacagacacaacaacaaaaaaagaaaacttcagcgtaatatccttgatgaacactgatgcaaaaatcttcagcaaaatactggcaaaccaaatccagcaacacatcaaaaagcttatccaccatgaggcttcatccccaggatgcaaggttggttcaatgtaggcaaatcaataaatgtgattcatcacataaacagaacaaaagacaaaaaccacaagattacctcaatagatgcagaaaaggctttcaacaacatttaacattccttaatgttaaaaactcccaataaactgtgtattgaaggaacatacctcaaaataataagagccatatatgacaaacccacagacaacatcatactgaatgggaaaaagctggaagtattccccttgaaaactgccacaaaacaaagatgccctctctcaccactcctattcaacataatattggaagttcttgacagagcaatcaggcgagagaaagaaataaagggcattcaaataggaagagaggaagtctaactatccctgtttgcagatgacatgatcctatatctagaaaaccccatcgtctcagcccgaaagcttcttaagctaataaacaacttcagtaaaggtctcagaatacaaaatcaatgtgcaaaaattgctggcattcttatacaccaacaacaatcaagccaagagccaaatcatgaatgaactcccattcacaattgctactaaaaaaaaagagtgacatgcctagaaatacagctaacaaggaaactgaaagatctaccaagagaactacaaaccactactcaaagagatcagagatgacacaaagaaatggcaaattattccatgctcatgcataggaataatcagtatcattaaaatgggcatattcccaaagcaatttatacattcaatgctattcctattaatctaccactgacattcttcacagaactagaaaaatctattttaaaatttgtatgaaacccaaaaagagcccaaataaccaaggcaatccaaagcaaaaagaacaaagctggaggcatcacgctacctgatttcaaactatattacatggctacagtcaccaaaacagcatggtactggtataagaacagacacatagaccaatggaacagaatagagaactcagaaatatgaccacccaccttcaactatctgatcttcaacaaacctgacaaaaacaagcaatggggaaaggactccctattcaataaattgtgctgggataactggctagtcatatgcagaagattgaaactggaccccatctttacaccataaagaaaaattaactcaagatggattaaagactcaaatgtaaaacccaaaactataaaaaccctggaagacaacctaggcaataccatttaggacataagcatgggcaaagatttcataataaagatgccaaaagcaattgcaacaaaagcaaaaattgacaaatgggatctaattaaactaaagagctcctatgcagcaaaagaaactatcaacagagtaaacagacaacctagagaatgggagaaaatttttgcaaactgtgcatctgaatgaggtctaatatccagcgtctataaggaacttaaacaaatttacaagaaaaaaactcattaaaaagtgggcaaaggtaccctgaaacttaaagtataataataataaataaataaataaaaaagtgggcaaagaacatgaacagacacctcttaaaagaagacatacatgtggccaacaatcatatgaaaaaaagctcaacatcattgatcattagagaaatgcaaattaaaaccacaatgagataccatctcacaccagtcagaatggctactataaaaagtaaaaaaaaaaacagatgccggagaggtagtggagaaaaaggaatgcttttacactgttggtgggagtgtaaattagttcaaccatcgtggaagacagtgtggtgattcctcaaaaacctcgagacagaactatcattcaacccaataatctcattactggatatatacccaaaggaatataagtcattgttataaacatacatgcacacgtatgttcactgcagcactattcacaataacaaaaacatggaatcaacccaaatgcccatcaattatagactggataaagaaaatgtggtacatatacaccacggaatactatgcagccataaaaaagaatgagatcatgtttttgcaaggacatggatggagctaggggccattattcttagtaaactaatgcatgaacagaagaccaaatacagcatgttctcacttataagtgggagctaaattatgagaacacacggacatatagagggaaacaacacacactggggcctatcagagggcagaaggtggtaggagggagagaagtaggaaaaataactattggatactaggcttaatacctgggtgatgaaataatctatacaaccaacccccattcaacgcatttacttatgtaacaaacctgcacatcctgcatatgtacccctgaaactagaagttaaaaataaataaataaaataatgggccagcctcagtggctcacacatgtaatcccaggactttggggggccaaagcaggcagatcacttgagaccaggagttggacaccagcctggccaacatggtaaaaccccatctctagtaaaaatacaaaaattagccaggcattgtggtgtgtgcctgtaatcccagctactaggaaggaggctgaaggagcagaattgcttgaacctacgaggtggaggttgcagtgagctaaggttgtaccactgcattccagcctggacaacagaatgagactccatctcaaataataataataataataataataataataataataataataggttataacataatatttgcaagcctcatggtaacctcaaattgaaaaacaacagatacaccaaaaaaaacccaataaatttaaaaaaacataaaccagagaaaaattaccttcactataaggaacacaggaaggaaggaaagaagaagaaggaagagaagaccacaaaacaaccagaaaacaaaaaccctaatggcaggagtaaccccttacctatcgataataacattgaatgtaatgggactaaacactccaataaaaagacatagggttgccgaatggataaaaacaagatccagtgatatttagactacaaaaaatacactttacctataaagagacagactaaaaataaaaggatggaaaaatgtatcccatgcaaatagaaaccaaaaaagagaaggagtaactatacttacatcagacaaaatagatttcaagacaaaaacaatgaaaagagaaaaaaattatataatgatcaaggggttaattcagcgagagaatatagcagttgtaaatacatgtgcacccaatactgaagcactcagatatataaagaaaatattattagagctaaggagagagatagacctcaatacaataatagctggagacttcaacaccccattttcagcattggatagatcatccagtcagaaaatcaacaaagaaaccttggacttcatctacaccataggccaaatggacctaatagatatttacagaacatttcaactaatgactgcagaatatgcattcttctcttcagcacatggaccattctcaaggatagaccatgtatttgatcacaaaactactcttaaaatattcagaaaaactgaaataatatcaagtatcatatctgatgacaatggcataaaactagaaatcaataacaagagggattttggaaactgtacaaatacatggaaatcaagcaatatgctcctgaatgaccagtggatcaatgaagaaattaagaaggaaatgtaaacatttcttaaaacaaatgaatatgaaaataaaacataccaaaacctatggaatatatgaaaacagtacttaaaagaaagttgatagctacaaatgcctatatcagacaagtagataagtttcaaataaacaacctaaaatgtatctcaaagaaccagaaaaggaagagccaaaaaactccaaaattagtagaagaaactaaataataatgattatatcagaaataaatgaaatttaaatgaagaaaataataaaaaaatcaataaaacaaaaagttagttttttgaaaagataaagaaaattgataaaactttagccagattaagaaaaaaagacagaatacccaaataaataaaattaaatctgaagacattataacaaatactgcagaaaattagtggatcattgaggttactatgagcaactatatgccaataaattggaaaacctggaagaaatggataaactcttacacccatacaatctaccaagattgaaccataaagaaagccaaaacttgaacagatcaatatcaaataacaagatcaaagtcatgataaaatgtctcctggcaaagaaaagcctggaaactgatggcttcactgctgaattctaccaaacatattggtagaattttaaaaagaactaataccaatcctacctgaactattttaaaaaaggaggaaggaatacttccaaactcattctatgaggctagtattgccctgataccaaaaccatacaaagatacatcaaaaaaagaaaactacaggccaatatccctgatgaacattgatacaaaaatcctcattgaaatcctagcaaacttaattcaacaacacatgaaaaagatcatgcaccatgaccaagagggatttatcccagggatgcaagaatggtttaacatatgcaaatcaatcaatgtgatacatcataccaacagaatgaaggacaaaaatcatatgctcatttcaattaatactgaagaagcatttgatacaattcaacatcccttcatgataaaaaaaaatgcaaaaaactgagtatagaagaaacatacgtcaacacaacaaaagccatatacaacagcccacagctagtatcatgctgaattgggaaaaactgaaagcctttcctctaagatctggaaaaagacaaggatgcccactttcatcactgttattcaacatggaaatggaagtcctagctggagcaatcatagaagagaaagaaataaagggcattcaaattgaaaaggaagaagtcaatttatacttgtttgcagatgatataatcttatatttggaaaaacctaaagactctacaagaaaactgttagaactaataaactcagcaaagttgcagatacaaaatcaacataaaaaatcagtggcatttctatattccagcagcaatctgaaaaagaaatcatgaaaataatcccatttataatagctacaaataaaaggaattcacttaccaaaaaagtgaaagatctctacaatgaaaacagtaaaatattgatgaaagaaactgaagaggacacaatacaatggaaaaatagtccatgttcagggattagaaaaattaatattattaaaatgtgcatactacccaaagcaatctacagattcaatgcaatctttatcaaaataccaatgacattcttcacagaactagaaaacacaatcctaaaatttatatgaaactatgaaagacccagaatagccgaagctatcctaagcaaaaagaacaaaactggaggaatcacattacctgacttcaatttatactacaaagtgacagtaaacagcacggtactggcataaaaacagacacataaacccatggaacagaatagagaacccagaaacaaattcatacacatgcattgagttcatttttgacaaaggtgccaagaacagacattatggaaaggatagtctcttgaataaatggtgctgggaaaactggatatcaatatgtggaagaatgaaactagacccccatctcttaccatatacaaaaatcaaatcaaaatggattaaagacataaatttaagacttcgaactgtgaaaatactaaaagaaaacattagggaaactctctaagtcattggactgggtaaagatttcttgaataataccccacaagcacaagcaaccaagcaaaaatggacaaaggggatcacatcaagttaaaaaaaaattctgcactgcagaggaagcaataaaaaaagtgaagagaaaacccacagaatgagagaaaatatttgccaactatccatctgacagggggttaataaccaaaagatataaggagctcaaacaactctatgagaaaaaaaatctaataattcaatttggaaatgggcaaaagatatgaataaacatttctcaaaagaagacatacagatggcaaatagatatgtgaaaaggtgctcaacatcattgatcatcagagatatgcaaaacaaaactgcaatgagatagcactcacctcagttaatattaacttttttggataaattcaaaaggccataataaatactggcaaggatgcggagaaaagggaactgtcatatactgttggtggaaatgtaaattagtataatcattgtggagaatagtttggaggttcctcaaaaaattaaaaatagaacaaccatatgacccagcaatcacactgctaggtatatacccaaaagaaaggaaatcagtatatacaggagatatctgccctcccatatttattgcagcactattcataatagctaagatttggaagcaacctacaagtctatcaatagatgaatgaataaagaaaatgtggcacatatacacagtggagtactattccgtactctaaaaagtacaaataaaattctgtcatttgtgacaacatggataaaactggaggtctttatattaagtaaaataagctaagtacagaaggacaaacttcacatgttctcacttatttgtgggagctaaatattaaatataaaaacaactgaactcatggagatagaaaatacaatgatggacagcagaggctgcgaagggtagtaggggaggagggaagtaataatggttaatgagtacaaaatatctagttagaatgaataagatctagtatttgacagaacaatatggtgactacagtcaacaataatttattacatattttataataaccaaaacagtataagtggaatgtttctaacataaaggataaattcttgaagtaacagcccaaaaaataaaaaattgaaaggatgactattgctgtacttttcttccagaacctcctctcctctgctcctgagagcattcttctcattgatattggtaaattctcctgttcccaagaatttctataatatccccttttactctaatggggaggtgctcctagagtttcacaaggaacatgatggcaaggttttccgatgagtgaagcaacatgacattgatttctcttgctttctcagtagatacaaaataaataccaggcaaaactgctcacttgtgggtagcctgcacgtacacacacacacacacacacacacacacatgtgtacactcatacatacatacacataaagattttaacttcagaggaaatttctagttgctattgagtttttcaaaactgttgcatgagacttcttcactttttagcattttcatataaagttgggaaatttattttaacccaaacaattttttacctaattctccttcttgctatcattttaatcatcctaagtgtactagaacacatgacaaagtcacacagaaacattatttctccacttcaatgcattagaagaaatttaacaatgagtctaggatctagttatattaaggaatccggtggaagagggaatcacttataaaagaattatgttatttggatagataattaattaaaaaacaaattctaggtcgggtgctgtggctcacgcttgtaatcccagcactctgggaggccgaggtgggtggatcacccgaggtcagtagttcaagaccagcctgaccaacatggagaaaccctgtctctactaaaaatacaaaattagctgggtgtggtggcacatgcctgtaatcccagccacttgggaggctgatgcaggagaggttgtagtgagccaagattgcaccattgcactacagcctgggcaacaaaagcaaaaatccatctcaaaaaaaaaaaacaaaaaattccaagacttccactaactaaagacttcctaagtagaaaaatcaatatgacagaattccatttaactttatttgtatatcccctagagcagtggttctgaaactttgtgcctcagaatcacccaggagacccacctccagagtgtctgtcggtagttctgggtggggactagaaatttgtgtttttaagaagtttccaggtgatgcagctcctgctggtccaggaaccacactttgggaatccctgccctcaagtacacagtacaatgctaggcacagagcagctactcatacattctgaaccaaattgaattatttgaaccatagttatggcaagataagatttgactcatatagattcttaggccaggattagccaagtttgtgattagtaaagtggttttaaaagggttttcctatgttatagacatagtttataatcttaagatctgctttgtcacgcctttccaggatattgtaattgagttggtgataagctagtataagtatggtcctgggatttttcttctagaaacttctcttctgacttgcaatctgatgtgactcaaggtcacagattaccagaccatccaattatttagcagcagagttgtcttgctatacccttcaccctactaagagtctttacctttgctgaccccaagagaagagaatttatactgtaagactgacagtcctacagaactgagaattctctatcaatgggcaaaggcagccctatccttaatttcaactccttttgatatagaagggatcattctcagcatccacatgctggaaaatattattggcattattcatgaaacaacggccaggacagtgaccacaggagttctgtgcataatgacctgcttagtgggtacccttaaaagatttactacatcaagtttttattaaggcacctcttccaggctattgttcttttcataagcatcacaatggtttctcaagcagttttaatgtggaaatgtgaaaatgtcaagcatttctcccccactcaccactcctctctttcttttcccaggttgtgatgaataacttaagcccagcctggaaatcattcaaagtatctgtaaattctctatgcagcggagacccagaccgccggctaaaggtcagaaatctgtgtccaagaaatgtgattttttaaaaaaagtatttaatcttcctatttcttttcaaaataatattgacaaaccccaaattttctttacactgtacccaaccctctcatcttttagcatctcgatggaagaaacaagggctatttcttcttctagagccattgaagcttatgtgaaagcccaaaatcaattccaattatgttatatcaagaggcaaaacccatgtcttctgaaagacaaaaccatggcaataaattcaggttataaatgagagttattaaaatgaaaatagtgtcatatcaattatctactgttatataacagaataatgcaaaatttagtagcttagaactagaagcatttatttagcttatgattctgagtactgacaagttgggatgaactaatctaggtgattcttctgttgatcttgcctggactttctcaggcatttgtggtcagctacccaagaggagggtggttctgcttctggaggttggctggctgtggtctggaatgagagaaggggtggggccatatggctctcatcatccccaggccagcttggactaacacacacagtgaacttagggttcgaagaatgcaagaacagagccccataagacctctttagggcctaggctcagaactcacacaggtcacttcctccacagtctaggtcaaagcaagtcacatggtcattacagatttaaaaggtaaggagatagactacatctcttggtggaagaagctccaaagtatcgtggccactttttcgatctatcacgaaggctttctgagcaccttgggaatgtaaaagttggaagaaaatatgcattcaaagtcaccaaaggaagacagtaggctgaacgccaggagcagatttcaggagatgtttttataggccatgctctggcctttcctctaccttgaaagtctagacgttccttgttgtcaatggcccggaggtgattcaaccaattaaggataactaagcaaatctactggagactggtgcctataaactaaaaggccaattgattaatgttcagtgaaaaacacaaccatcaagcagtaatatcagcttcaccagggcattttcttgtgggcaaaccacagagaagacaatcatcagaaggttgctgttattgcctgaaatcagaattgggtaactgagacagttaatggcttcagactctgaaaaccaggagtgcccacctccactgtccatcaggcagactaaacattcatgttgacttctcaggacaactaatcccctggaaagtgttagctgggtagctggacattgatgatgtttgccttagtagttttacattttcctcactacttttgccccacaaaccttctgacagatacaattttttgattcattgatatgatctgtcaggttagaatcccatctgattggttaatctcaagctctttaaggttgctttatatgtctttgcttaaatccattctgtatgagctttgcagttgaactcttagcagacatgttcacttccatgttcttgaggagcaactcagagttgcacctggtatctctgtaagaactgagatatttcaagcctcaaccccactggaaaccttcaagccaaaatcaggattcctggctatttggtccttcatgtggaagctcctatgcagaatggccaagagctgtgacttcaggcataggatggcaattatcacttacacgttgagtagcaccctcctattcccagggaggtaaatgaccctctttggccagaaataaaataatacctcctttagccatatatctactttttatgaggagtcattaaactttttatgaggaggataaaaggagagggtcatctgtaattgaataaataaaaatgcagaaaaggaacactttgtggctttctgagtgctctgctgcctgtagagaaataagtaggaggtaaggaaatagatgattgattgatagatgatagaggagagaaagaaagaatgtgagaaggaagaatagaggaaaagaaggaaaaaaagaagaaaggaaagaaaaaggaaggaagggaggggggagagaaggatcagggtttctccacacgtgcactattgacgtttggattttcctgtggggagctgtcctgtgcctgtaggatccttaacagcaaccctagctactagatgccagtagcatttcacccccgtcacatacacactcacacaccctgctgcctgtgtcagtctgaaaatcaaaagtgtattcagacattgccaaatgttctctagagtgtaaaatcacttccagttaagaaccactggtatagtacatcaaacttattatacattagagtcacctgggagccttgttaaactcctcaagaacctatgaaaatgttttaatttctttcaaaatcagaagaagagaatgaacatgtaagattaactaaaatattctaatttttttttcttgcatcagaaagcaacgaactttttagggtccatgaaaatctgttgtgttaaaaggggcccatgaaggcaaaagtgccaatgaaagtcacactgtgttcctatcccaaacatcttgtcatctcatcagaaaatacttcagtatgtattgctaacattgctaacagataataaatctttccattaataaaactataaaacattattcttaagaatgctaactatacttccttaatgccaccaaatattctgccattgtttatgtttgccagagtctctcatttattaaacaattgtttctatttgtttaagtgaagatttaaacaaggtctaagcactgtatttgactgagatgtctctgaagcctcctttaatcagttcgttctcgctccccttttttttccccctgtaatttacttagtgaagaaaccaggctggtttgtcccatagcatttctcacattctgtgtttcctataaatgcatatttagaacttgatcagatttcagggtctgttttctggcaagaatgccccagtattattaacaatttatggattttttaaatatatttcagtgtttccatctatttcagttattataattcctttgaaatcttaagttgtcccatatttggccaataaaagcttcttcaagttggctcttgaattcttttgatataaacttagtaacgtccttgcttgataacgtccttgctttctggaatgaattcttgacctaaatcaattttgaaattttacaattctttttcttcattacatatgtatttctatggatgcagagccatattttaatgtctctcaaaatcattcctctccatagtatttaaggtctctgtggacctatagcccatggaacagtcaggttcatttgtttcattttgttttcaatttttagatattttttcaaatttaattttgccttataattatattaaatgtttacatggttccaaagtcaaaactgcaaaacagggaatattcagaaaagattaacttccattcctgtctcttctaccttttaccttcattttgtagcatattttgtatgctacgttttgtagcatattttaatacctggtacagctagccatacccacttccgtattccttgccttcttaagggttttcctggatattttacctgtttttttcattgagctttataaacaacttatctaataccagaaaaaaacccaaaacttgataatattttattgagattgcatttaacttgtgaattaggcagaattttctctttataatattgaatcttcctatcctagaatatggcatgtcttttcattcattcaagtctccttttgtgttttgcaggagtgcttaatattttttctcttattttctatgtacctcttagaacctctattgtttgcataaatgaaggtcattgaattttttcttaaactaatatttgttctcttattgtttatagtgattttcccattaactttttttctttttctcttttctttctgttttttgtttgtttgtttgtttgtttgtttttgagatggactcttgctctgttgcccaggctggattgcagtggcgcaatctaggctcactacaacctctgcctcccaggttcaagtgatttccctgccttggcctcctgagtagctatgattacaggcgtgtgccaccatacccagctaatttttatatttttagtagagacagggtttcaccatgttggccaggctggtctcaaacacctgacctcaagtgatctgcccaccatggtctcccaaagtgctgggattataggtgcccagcatgtttttttccaaatatataatcatactacttgaaaatggagatagtttttatccttacccctttttttcttctaataccctcaatgtgatagatggcagtggaggtagagggcctccttgtcttattcatgaacatagtagaaaattctatagtgtttccccattaattctggcagagattaatttttctgtagagacagagtcttgctatgttgcccaggctggtctcgaactcctgggctcaagcagtcctctccctcagccttctaaagtgctgggattacatgcgtgagccaatgcacctggctgggattcattttttaatgtaactctaaaggtatcagacactcagtgctttctcagccatgtctactgagccttaattacctatgatattcaatacaattaaataccttaaatattcagatcatatttttactagttatggtaacccaagagataacaccacaacatgctaaaatgtcttctgaactgcataaaggcattacactactactttctatggcatcctagacatgccatattctaggatagactcaatatatattatttctaaagcatattagagtttataaggcccttataaatatcataatttcatttacttctaaccacattgtgaggtaggttccattatcttcattttacagatgaggaaactgagactcaaaaacccatgttgttaaacatcaaattcaatgttgttttaatcagattgcactgcctctattttattgtattatacttattagaaaagaaatcatcctgataagcctatttcttgaccttttcaaccagaatgatttatttaccattatgctaatatttaacagaagatttgtctatatgtaacatttcataaggtctgagacactaaaggaaagtctctcaataaaactataacacaatgcttacttatcaatgtatgatttataagaaaataaattactctcccagaaatatgtacctcttagattctaggaaatatggcattaatcattttatttgatttgatcaacatattgttaatacccagaacatattctttaggaggcaatgttgatgttcagaatagattcttccagagagtgttcttagagaagaaaatggtgagagggtactatcagcaagtatttattcataacccaattatgcctagcactgtggaaaactgtcatgccagaacaatcttgacaaacaccatataagcaccctgagaccatttaatcacatgtattatggggccattttctatctctttctctaatttccaaaccacacaagtaacatggatactttcccctacacaaagttcatcaagcatcatcagagtatggttgataggagctatttgccttgaaggggaaaactaaggtgatagcaccagttgttctggatcaattcgcccccatgccttatgtaggagagaggcccaggttattaactgagcccatggtgcagtaaaggaaatggcagaagagaagaagaagcaggtccccaaagtcaaagtagaagggagtaagacccaggaacccactaaggggtgaaaggaggcccaaatacaagtctaaagcaacccctgaatgacatttcacccatgattcatctcgcttgttctttgcgccgtctatcttaggctgccatgcctggttggtttaaaacagccatgttcttgagttgccttctgacacccccaaagctggattcctggacaatcagaaaagtgctctgttaaatcagaatcccacactcagtggtcctggagtcttcattttaacaattttcataaacaatgctggtacaggccatttgccaaacacacattgagaaatactgtctttttttttcctttaagttttttactttattattttttttaatttacgtttttttactttaagttctaggatacatgtgcaaaatgtgtaggtttgttatgtaggtatacacgggctatggtggtttgctgcatttatcaacccatcatctgggttttcagtcccacatgcattaggtatttgtcctgatgctctccctccccttgcctcccaccccctgacaggccccgatgtatgatgttcccctccctgtgtccatgtcttctcatttttccactccgacttatgagtgagaacatgtggtgtttggttttctattcatgtgttagtttgctgaggatgatggcttccagcttcatccatgtgcctgcaaaggacatgaactcattcttctttatggctgcatagtattccatggtgtatatgtgccacattttctttatccagtctatcattaatgggcatttgggttggttccaagtctttgctattataaatagtactgtgataaacatacgtgtgcatgtgtctttatagtagaatgatttataatcctttgggtatatacctgtaacaggattgctgggtcaaatggtatttctggttctagatccttgaggaatcaccacactgtcttccacaatggttgaactaatttacactcccaccaacagtgtaaaagtgttcctatttctccaagcctcaccagcatctgttgtttcccgactttttaataatcaacattctaactggtgtgagatggtatctcattgtggttttgatttgtatttctctaatgaccagtgatgatgagcttttcttcatatgttttttggctgcataaatgtcttctttggagaagtgcctgttcatatccttcacccagttttgatggggttgtttttttcttgtaaatttgtttaagttccttatagattccagatattagacctttgtcaaatggatagattgcaaaaagagaaatactgtctttctactgattctccaaacctagctgactcactacaggtaccacccttatgtagttcagcacggtttctgatgccttactgtgaggctgagtgtatatgtatatgtgtatgtgtatggatacattctgttcttcctcctataagaaatccttaacacctgttttttgattacatccaactattcatatctttcttatttcatgtgtgaccaggccatcttcaattgaaattgtattttctccacaaattcactgtctttgctttggcctctctgagccagactgacacactactgccaaatggatttgagtccactcatagagtttgcctcggaacttccccctttattcccagcctcatgtgactcttaacccctgggtccctacttgcctcttattttgcctctaatcttttagaattaattgcatgtttgttttctttctgtttcaagctgatttttttctagcaaaccttctagctcttactgcttggaaaggaaaagacaagttccaacccccagatctgaatccttggcattgatcccaattcagccccataattcccccaaacccatagaaagggctttaatcattagatatgaattacatcaacatttcacgattattggtgcaaaacacaggcagttggaattgaggagtccactgctatgttcagcattgttggaaacacctgcaacaaagaacctggcatttctaggcaactgaaagcaatttcaccgtcctctctatgtgccttatatttgtaacaggaaaaaaaaaatccttggatagctcatggtcctcttgagttttctggagatctggtcagattcaagtgctttctttatggccttctggactcaagagctgctgattttgtgcctgtcaatagttcagtctgcctaaatgtcctggaacttatctgattgcagactcatggaggtgtctctatattggatcagctatagcacaggaattcttgagtccacttaactaaatggcacccctgagtacagcaggctgcctctactgaaatcggaaatcaatactgcagcgtgaaaaagcagtagccagctcaaatagtgttaaatcatgcaggcttctgaattgagagaaaaactacatattctctcaactttaataattctttcttttcattaacattatcatcttatattacaggtgaggaaattaagaacctgtgttttcgcaaattgcttataattacagagcttagtttacacagctttagtttaaacctgggtctctcctgctctataatttctgctcttcagtatttaaaaaacagctaatatttactgagcacttaccaggtaccagacattgtgatgggcactttgattaaattttctcattgaactctgtaattgttctaggttaagcaatgctgcagtaacaaagagcccctgtgtaatagaagttaatttcttgctcacataacaatcaaaggtaaaacttttatatcaatgtttgcctctccttcatgaagtaatccagtaactcaggttgcttctatcttgtggctcatccatatcttagggacttatttttgtttggatccatcaggcaaaaggggaaaaaatatgaagaggcctctctctaaaagttttagctgaaaacaacatctagcattgctgcctatattccaatgggtagaactcagtcacatagccacagtaaatggcaagagaaaccaggaaatgtggcctagtaggatgcctagaaatagaaggaaacagatttttggtgaattggctggctcttccacagggagacactcttattatcctcattttgcaaatgggaaaactgagactaacaaagattaaataactagcctaaattcacagagctagtcagtggcattggaaggatcaagtctttatgactctggaacctaaactccataccagaacctaaagtccaataaaactttccgtgatgatggaaatattctgtatctgtactcttcaaaagagtagccactacccacatgtggccaaagcaattctttcccaacctctcctctctttctcttcaagcctccttcttattttcagtcctcccattctggtatcccatccccttttcttcaaaacacatcatccttcccatccaccaaggagaaaattctgccccttcatgtgtcaagcctatgatgctaatgggacccctcctctgcctagtctttagtgactccaaattggaagaaatgggctgttgtacaaatggggtcaacactaggtgcttcaatgtcaaaataactttttcattagtgaaaattagatctgatttccttactatctaaaaagagagcctaccttgccaaagcaagtgctagtttgcttgtttgtttccaagaaaccatataaactgatcttacattaaaaagaatcttgggagttagtgtttcagtggggaaaacagaaaagttctggacaaagatggtggtaatcgttgaaatacaatatgaatatacttaatgccacagagctgtaaatttaaaaataaatggcaaattttatgttatgtatcttttaccacaacaaaaattaaatttagaaaaagccttcttcctgttaacatgactttgaacctgctccttgtgaaacaactgcctgacattattgtactacagagtatttaatgcctgcctaaagctggcataccttacctataatggctcttgttctctcagcaatctgggatgagggtatggcagctcctaagcgattctttctgactcccaaattcctcccttttggaaacccttgcatgcaaagggtacagtccttccttgcccaaccattatgagggaagaggccaaaagagatggtacaacctggccaaactgttttattgaaaaaattgtccatggtcatgctctgtctttgatttttttaaaaaatgtttttgaaaaagtcatctttggaaaacactttgcaagtctaaaactaaaagtatcagatgaatgctattcagtgccctgatgaggtctctagttgaaagtaaagaggtagccctcttattatctggctggacatttccctactagagagaatgtccatctaaataagttgcaattgctgcaactggaagcagtttcctcacattatttaatccatctgcatccccttctgcactgaaaatggatagctaaccagctactgggaagatacttggggaaaactgggacgtggataaagttgcttaatgatgaagggaaggattattctgagtagaaattctgagaatcccccagtgcaattttgtgtcattattcaaattgacaggactcactactctgtttaaataatgctgtgttctggtaacactggttatgctggttgctcttacttgattgtttatttagtttaaaatatttttaatatgagatactctatagtttattccactactttgttcacacagaaactgaaaaagttgcctcaagatctcaattttcatttttgcacatttggaaatgttgtttttaacctagccttgtcaacaggaaggttttcacaaactggattgacatcccaagatgccttttcattgagtcagtttctgcagggcatccagcttctctcccacattttaaacattaaaccagaatgttgtttgaaaaagatgaaaacatcacaatccgcagccatcctgggctttttttctggaaagcattgtcagtagaatcatcaaataaaacatgaagagacctgtctcttaggaagaagatcagctttcataaagaaagagtccttgaagcaaagggaaatgaccctttcttagatgcttggcagaacaatcccataggccctccttctcaggagctggaggaggtatcagcatctcctcaaagatatggtgcctgtaagaccccacctgtctgcagtgtttatacttcccaaaaagattaaggaaggccaggaggactttgtgtggagcacacaaaacaaatatcaagaaagagcaaattgactgacctgataagaaacgaattattttctctctgagagtgtgtgaattgttctttcttgggaacatgagctcattgaaaatgagcataaatacttttggacacttccagtaaagagaagaaagttagaatgatcatcaatcccacatccacccccatgcaatttagagagaaaccaggtagagatggagagatgcctcctcatgttgcctacagaggccactcgtgctgcatggctccagtcagggtcccccgtctcactgggtctagtctccagcttctttgctggtacaggaactcagctttgtccaatcactcagacttagtgggacctggaagaactgactcacggcaaaaggcagatgcataagccaggaggccaacatagtaatttacaaaaaacaaaaataaataaaatataaataaataaatttggcaagaactataattatcaagctccatacagggaacctctttcctgatacctgaatacttttgaagcagaattagcaaccaaaatatgttatttggtgagcatagaaaaatcaaggcaagggcacatgaggagtctggagagtgtttactctggtcagcagttgtgactgaaagactcaagagtctggaacatctgattaagttaataaggtgcttgatcttaaaaatatagataattcggccgggcacggtatctcacgcctgtaatcccagcactttggaaggctgaggcgggcagatcacgaggtcaggagattaagacaatcctagccaacatggcgaaaccccgtttctactaaacacacacacacacacacacacacacacacacacacacaaaattagctggacgtggtggcacgtgcctgtaatcccagctcctcgggaggctgaggcaggagaatctcttgaaccagtgagttggaggttgcagtgagtcgagatcacaccactgctctccagcctggcgacagagtgagactccctctcaaaaaaaaaaaaaaaaaaaaatacagataattctaggctttcatgtactcattaaagctgatctctgactcccaattcctgaggtgagccacagtatatcttgtcaatgtataattttcaaaaagttaaaagtatgactctcattgaactatcaaatgaatatgtatcaaaaattttattcaactcattaattgatgaggtaaccaataagaagataaaagttctccaagagcattttggataatttagtttacatagtctttttctttaaaaaggactaaaatttctagatacaaaattaattaatgtctttaggggcaataaaccataaacttcagggtcatctttacaccagaaggaaatcattgcatcatatacaagtttaacatgtataactttacagatcctgagccctcaattattaataataaatagtaaatagcagaaacaaataatggtaaattcttataggaaaatatatcatccttggatgggcctgttaaataatgattaagtatggcattgaaagggcttacggtcacactctcggacttgttttcaggttgtggataatttttcttaacaggctcaagtagctcctgagttcacatttctagaagatcctgatatatgcctgaaattcccacctgtccctctccattgcctccccatctctgaatagctggcatgttcttaacattcaggtgtcaactcaaaactgaagcactcagacttcgttgttcatacatacattcctccagttactcttcatctaatcaccatctccttcatggcacttaccaccatctgtgattacgttgtttatttgtttacatgtttatagtttgagtcctctactgaaatataagtgccaaggtccgtgggaaaggaactggcctatgtaattcacctctatatcctcagcccctaaaacagtgcttggcatatagtagattcttaataaatgtatgcttaaagaatgaatagatggatagatggattgatagatagatggatggatatatacacaagcccatagttacattagctcgataccattgatgacattgtaccagattttttgctatttggtctcaccttttaaagacccctagaaaaatacccctcttatctactcattcttatctccacatatatcgatgctagtgattaggttaattaggttaatgtttccatcacatcagttatgacctgggacacttcctttaatttaagacaagtctacattcatcatggaagctttctttcctcattgtcatgtctcagagaacttcccattgctactcatttgtcaccatattttctcctaacattttttttccttaaatttaaacataactttccctccaccagccatagggagttagaagaaggaaaggaagggaagggaagagtctggaggataaagcagccaacagagaaaagcactccttcaggaatgaggggctggaatgcaagtcacaaaaaaaaaaaaaaaaagaaacagtattgtggccacatctggttctcacagcatagcttttggaggggaaagaggcctaaaatcttagaaaaggaaggtaaagaaagtagccttgtggattttctaaatgtcaggtcctttttatttcactggcgtattttatggtttagtactttgcttctttgaacagttcctagaatagcaaggattaagtctagtactaaccatgataaatcctggtttacctttaagcaatgagatttttaatagaataaagtagaagagggatgtggggtgggtgagacaaacaaacaggattcaattaagtcttaaaatgggtgagaaaagaaagagcatcctttggattctgatcctcagaactttttctacaacctacttgtctccacccccctgccccccgacgtcggtttcatttcctgtggcaattaactttacttcaacattatgttgaccacacggcatgctttattgcaccggtatttaaaacctttcatgacagctatcccatgaaagagtaaaatcactaaatggacttgtcaggaagcattacctctagctcatctgccctgcagaccagctggccttcttcataagctctcttaccatgcaatcacccctgctactcccaataatcaaactgactcttgaaggcatatgatgtaacgaaccacaacagaccttaagacaaggtcagcatatgatctagaataatatcatcaaactttagcaacatcagaatctccaggaaggcttgttgaaacatacatcattgggtcctaaccccagagtctctgattcagtaggtctagggtggggcccaagacttgcatttctgacaagttcccagatgatgctgatgctgctggttcagagttcatgcgtaaagcatgattcatatagaagaaatagtcaagagacagtttcaacaatacatttccctcaattcacccatctcaaccttaaaatttctctatatctgcatccactgtttcttttttatgaaaacaagtttatctgcccactgcactccaattcaattactcaaagactctttcccagagtgttttaaggcaagaagaaagctttggagtcatctctcaatagttgcttcttaaattaacactattgacatttggagttggataattctatgcagtgggggactggactgggtattgtagtatggttagtgagcctctatccactagttgcaagtggcactgcccccttcagtggtaataaaaaaatatgtctctagaaactgccaaatcacccttgttgagaaccactactctagtcaattgtatctttactctctccttctttgttgggatttaagggtgaaaattcatcgcatgccttcctgagttggggccagttgagaaacaaaaacagaacttgaaaacatggccatcagaatataatttcactgttgctaaagctggccccagtgcacaagtaggaatgcttctcctgggagatgtttgggttgtgattaacaataggtgaatgaattctggctttaaactaacacagaaacagaaaaccaaatactgcatgttctcacttgtaagtggaagctaaatgatgagaacacgtggacacaaagaggggaacaacagacgctggggcctacctgagggtagagggtacaggagcagaaaaaaattaaaaaaaaatttggtactaggcttagtacctgggtgacaaaacaatctgtacaaaaatccccatgacacaagtttgcctatataacaacacacccatacccctcaacctaaaataaaagattaaaaaaaacaatagatgaggaagcccatagctaatcttaggtagggaaaaaaataaatgtataaataccaggtgggaccacagtggcaaaactaaggcagtggatctcaaccttggattcatattagaatcacctgaggagctttaaaaaccactggtacctagaccccacctcagaccagttaaatagaatttctgagtataaaggccaaaacatcagaaattttaaaaagcagccaaggtgattataatgtgcagtcaaagtaaagaaccaccgcttaacttaatagactgagaacattaaatcccttgttagatttttctttaaggtattaaggagacagcccctagtctgaaacaagatctctcagtgtttcttaagactttttcagtcacaaaattctgctgacgtgtaagttgcataaacataatagaaaggccatgaaatatttacaggcttcagagtaggcttcctacttcaagtgtctaagccaagaacttgaacgcatgtgcaaagacctggaagtttgtgattaataggctgaatgctgcagcattttaacgtgttggggaggagacctagggcaggaaaaaatatgacaaggttagtgaggtaaacagaacatttggatcatgttaaggagtcttaatttctatcctgagagcaatgggaggcactgagggcctctatgcagaggagtgatgtggtcatatttggatttctgggattaggactctgcctattttgtagaatttgaattgcatgagggcaaggctggaggcaggaggtctggttaaaagtcgtatcagtggccaggcgcggtggctcacgcctgtaatcccagcactttgggaggccgaggcgggcagatcacgaggtcagcagatcgagaccatcctggctatcatggtgaaaccccatctgtactaaaaaaaatacaaaaaaattagccaggcgtggtggcaagaacctctagtcccagctactcaggaggctgaggcaggagaacagagtgaaccgggaggcggagcttgcagtgagccgagatcgcaccactgcactccagcctggacagagcgagactccgtctcaaaaaaaaaaaaaaaaaaaaaaagaagtcctatcagtaatccatgtgagttaatttttaaacagggatgaccagaacttggtaccagatcacctttggatataaagagaggaagaggaaagacttaaccctgattcttctattggtcacgtggatgaaaaatggtaccataccttaaaatcagaccactgaaggagcaaaaggtttgggatgagaaagatgaattcagttttgtatttgctgagttgaaggcatctacagactatacagtgggcagttggcccaggattgtatcaaatttagcactggaagtcccacatctcaggaaaccacttagtcctgggtgaaccaggacagttggacaacatggcagttgcctacataagtttgattctcagagaagagaactcagcagggacataaatatgagttgtcagtaaatatatggcaagtgtgcgtgtgtacatgcatgtaagtgctcatgtgtgtgtatgactagaaggaaaaacaccaatctaataacagtatattcttctcagtggttaaatcataaagctatttattttttttaaattggcttttaattttctaacttaataatatatagtttaaaattcacacacacatttttaataagcatgccaatttgttatatttgctgagaactttctagttcctgtttaaaaattcaaaatggaaataattatttttaaaagtcctagagaggtttcccggtatgggcaagtgtattctacttttgtatagtgatattagacaacattaagaaatagactacagatcaatttggttagtacctggtgacaatctcctaaattccagtgtctacttaggcttaaagtaacctggcaataggaaagtcacttggtgatatgaactaaactgatagagaaggctgctgtccttctacgtttttattagctttctaaaatgagtttatcatatactaccttgctctgttgttcattctgcaaagacaacctacactacacagtaatcaagtatgtatttgagacttagcagccgcacctaatttctttggaaagcatatcggcaatgatttcatcagccatttattaaaacaagtaagctaaaaatgataacagcaatcctcaatctgagtaacgaagagagcatgggagaagcctatgtaagttctggatcctgtagaactgggtacaccggtgttgggatttgaagcccaggactccttagaatcatgtgatagagacctcaaggtattccaacaactttatcatcccagtgaaaaaaactgagaaccagagaggaaaaattacttccccgggaccacacagctcattagaagccagactaaaacttggatctggacttacagaagggaaaagagcattaagacagtattgtgtacctactgtgtgccaggaactgtgccaggtactaccccacattccatcccctctgtccatacaacaaaattgcaaggttaacaaagaaggaaactgaaaatcagagagctgagtaagttcctgaatatttgcagacctcttgagggaagaacctgaagcccaggtctgtttaactctaaagtcctttctcctaagacttcctaaagccttgtgtttcttctgtcaggccacactaacttcctcaaaactaccattctgatatgtaggctaaatgaggaaacaggttcaattgatcttctaaggcaggagaaaaacaaaatagtagatgtgtttatctatcatcttcagtaatgaaaggaaaaaggaagagaagaaataccaacgactttcctgagatttaatatcacccaacacatttcaggtgaagtgcccttaggtgtggacagttgggaaaaagaggtctcgagggtttttctaagcttttaataaaagctcagagagccccatagtgtttaaaatatctcaggaggaccctgcatatatgtgggagaaattatgtatgggaagaaaggggaaggccctttgaaggattctttcttgcttttctgagtctgaagtcagaagtaataaaaactctcttttgcctttctgcctacattttataaactgtatctattttctaatgctttcctcaacattttctcttcagagcctcacctaggaaatagcacaggaattaatattctaattttacagatgaagaaagtgagacatagattaagtaactgacacaggatatcatggataactagcaaaggtgggaagagaaagtgggaaaaagagatgtggtttgaaatggtttaccattttttactatgcatttctatcaataaaagcacccttcaatgtaggcacattttactaattgcaagcatttactattatactaatatagtatgtatgttttaaattttatgcaataatagaatttttttttttttttttttttttttttttgagacggagtcttgctctgtcccccaggctggagtgcagtggcgcgatctcggctcactgcaagctccgcctcccgggttcacgccattctcctgcctcagcctcccgagtagccgggactacaggcgcccaccaccacgcccggctaattttttgtatttttagtagagacggggtttcaccgtggtctcgatctcccgaccttgtgatccacccgcctcggcctcccagagtgctgggattacaagcgtgagccaccgcgcccggccgcaataatagaatttttaaaggctatggttaaaaaataatacagatgaaagtgcttatagtttcttccttcacctaaattatgatggtcacaccctagggtggcccctataactctcaccctctagtagtcatgtttttgtgtaattccctctccttgagcgtgggcaggatctgtaactctctaagcaatagatatggcaaaggtgatgggatatctttcttgtgattattttttatgtcatatatggttgtatggaagaggtgaagatgtaattaatatccctaatcacttgaattatatctaattaaagggcagttatactagtgggccttacctaatcagatatgccctttaaaagatggcctaggctttccctgaagtcagaaactccaagcaacagagactctgtctctcagcgtctgtcttctaagaaacaagccaccgtgaatagtacagccacaaattctgccaataacctgagggagcttgaaatcagatccttccctagtcaagcattcagatgaaaatgcagcctacctgacacctagatttcagccttgtgagatactaagcacacaacgcagccacggtgtaattgaactcctgacacacagaaagtgtgagataacaaatgggccttcttttaggccattattgtgtggtaaattattacacagcaatataaaactaatagaccaatagagggtcttttgtaccccttaggttttgcataccttatgcactcttttagccctttgcccacaagatctcgtttcatcttcctccaaaccctataagaattgatatttctgtaaccactttgggagtgaagtgacagactcagcaggcttaagtgacttgccccagctctcacagttagaagtgaaaggcaagagacttgaacgtcagcctggagattagaaagaataaagccagttcttctagcttccttttgttgttattgttgtgattgttgcatccaactggccctatagtgtgccacaacataaaactatttccacatggccgccctcccctgctggtgcctctcgtaataggaactagctttttctcctgggtttctgctaatttactgtcctgaattcttctacttcagcactgatgcattgtaggacctgtagctcttcagtgacaacagtgggttctgtgttccattgttacttacacacgagaagaatctgtgtgagaaccatctatcaggactgtaaagttacctgactataaagttctaacagttgactgcttcaatattaatggagcttgtcattctgagaagcaatttgatatgactttcctttcattctactgtggaacaaagtaccaaaagctgctgcttttcacaaataaatttttcacctgggcacagctatttgagtacctgttgttcatgtgtttccaggtctcaggtcttgcaaactcattactaaccaaacccagggacatagagttaaggaggaaaatgcttggtttccatgcttgccttgctggaggccattttcctctaataagaaagacttttgctgaactggaatgacaggaagacaggcaggacttttcttccacctacttacaggaattgggcttctgtgggcatggtccagagcttagtagcaccctccctgggcctcattttctttagtaatcaaatggagataatagtacctgcccttatttcatagcgttggttcattcacttattcactcattcattctacaaatcttagattgtctactgtattccaagatagccacatgaaaaaatttataatcaagaagcagagctggaattttcagaaccatgtcaatttcaaatatttaaactatttattctttaacaattataagtaattgctgaatatcttttaagtaccatctgtcttaattacattaaatatgtagtcattctttcagtcatatataaatcttctttcaagacctactgtctatgaagcaccatgctaggttcttaggatatggagatgaatatctctatcatcaggacattcaaagtgtaatggggaaggctgatgtccatgaataagcagataggtttttattatttatttatgtatttaattttgagacagggtcttgctctgttgcccaggctgaagtgctgtggcacaaccacagctcactgcagccttggcttcctgggctcaagcagtcctcccaccttcagcctcccaagtagctgggactacagatgcatgccatcacacctggctaatttttgtgttttttgtagagttaggatttcactatgtttctcaggctggccttgaactctgtgctcaagcagtttttcctcctctgcctctgaaaatgctgtgattccaggcataaaccactatgcccagccacacagacttattttaaattttaagtgaagaaatgatagggaatgaaaaatccttagagcacctatcctgggatgggggagaaaaatgatattgtcagagctgcatttctgatagttaatctggttctatggacttgaagaagagaagaaaaacagagtgctactgtggttcagacaagagatgaagaggcctgaaatgcagtcacattgaggataaaagagcaaaggagtcatttggagacttatttaagcaataaatttggtaggaaatgttattgcccagagaccaggtgggaaagggtaaaagggaaagtagagaatcaaaattcctctccagtttctattttgagtaattttttcccatcagccatgcagggtaggtttgttatcaccattttactcagagagcctcaagatcaagtaactagaaagatcaggaccaagattcaaacctaggccaactaactccaaagtccatgctttttgctaaaaatcaaacctcctctaggatcttcatatgaatctgacaatgtgcccctattcttagatccaaaaatctgttccctggacaattagatggggcaaaggtaaagaaaggacatggcaagattagagacggtggagggcaggcaaaaggtggaatctgataaccaggcttctcttccttccacgtcctacattcctttgccaatgctcttctccactagctggtacacagttcttggggttctcctggtaacttggtcctgtctgtagaaatcaacaaaggcagtttctacagtaacccttggcagtaagatttactgggatggctcacagcgtctccaggtattgagatatatcttatgtattctaaaaggaaaggcttaaaagatgacaatcaggaagcttcagttggctgcttgcttactagcatttctcaggctccgtctttcacttcagctctgatttgcaatatagaaccttctgcctggccaaagcagtatcttgacagtggataggagctattttacccctcagagttacctctgaatctgcacagtaactataagacagctgcaggcacagtagaatgcccctcttcccctatctctgctctgctccccaagactagaggctggtgattcagatggcagaatggtaccatctgtgagtaaatgctctgcatgatccacagtgatttccaaggtaacaaagatattccctagcagcaacagagcccagagatggtacctaactgtactcactggatgcctagaacttttcagagcttgtcctcatcctgacatgcttatgtatctctttttcttcaaccagctcatttgattcctagcattgttttttatttttaattttttgtggctatatagtaggtgtaaatatttatggggttcatgagatattttgttgcaggcatgcaatgtaatataagcacatcttgaagaatggggtatccatcccctcaaacatttaccctttgagttacaaacaatccaattacactctttattttagaatgtctgctgtgactgtcctcagcaggactctctctttctgaatttagccctgcaacatgtgttggaccttagaaacatgggggaggttttttgaggaggtttccagaggacagaattcaaccttgtgtttttctgctatatatagtgagcttttcctcactgtggtgagaaaactatatagttttctgctatatgtatgtgagtattttccctatatgtaggggaaaggatttcctttgtttcacagagtaggtcatttcaatgaaagttatgaaaacaggaaattatatttgtatattgattcattttacagaagaggaagaaaaaaatatgttgctctggaaggggaaaagaatcctttggcctaactcataattcttggtacattgtatgttttaaaagaaatgtaactagaactcttcagtatcctagaccagtatgaaatgacagattttctattattttccttctgtttgtgtatagtttgtcactttttttcagcagtttgtgtccttagtgaatcacagagtaagattctaagcactttctgaacaaagtaacccctgcattagaaattggatactatgcaacagttgaaaagcaaagcctttcatgcatagtttcttgagcctcctgagcctttctccaaggtcaaggtgagggctccactcacaattctgaaactcctctttgtgactttagacaaataaccttcctgtgcttaaactacattacctacaaagatggtaatgcctgcccctagccacttctcagttaccttttttcaggaagtgagaaagtctaaaaaggactttggatccctttaagggacctgttattttagaaatgcattattgggagtcagggccacataatcagggcagtcagatatttgccacaaaggctcttgagacttcaaagaataaaaaaatcaatgaattgcttactttatcaaaactctgtatttgaaactttggatcttttaaaatttatatggttatagttaaaatactttacttctctggacctccatcattaataaaatgggcataaaatagtacctgtcccatagagttgtaagaattaaaggaggaaatgaaaacaacacacttagcatataataaatagtcaaaatgcatggccaaagtgacctgtattagatgttatgatagataattaagatgttttgttggtgagacatcagatgaaatgaaacatacttgtgttctctgaggcaccagcccctcctgcagagagtcagtgtttccaagaaaaaaaaatggccaaacataaaagatgcagagatattatctgtaactagttataatgaggtcttcaaaaatatataactaactccagctctttgttctaaaggatgagtcccatttcaaggtaggtacgatgttagtctggacatcacagatggatagtggcaataacagcaatgtaattcaagacatcttgtatcctttcagtttgcagaaccatttcagtcttccaagtttttccggtttttcacttctaggcaacaatggtttggaacctccagcatctctgttggcagtaaattcctagttccagttcatcagaagctttttgcttgtgtgacattactcttggtctcctcttccttatctgaaaattttattgacctgcaattaaattatctacagttggaataattgcttgctgtttctctgcttctgaccactactggaaagccatttggactttagattgtgcccagctttccttcaccttccttgattatgctcctcttatgtacctgctaattttatctagagtccagagcattcttagaccttttccattcctgtaagtcccagaggatgacactgacttgcttgaggtcacagaatcaatcagttgcttagggtaagaggcaagatcttctcattcctaattctgtgatcttttcacttcttgtatgtatggccccttcttgtataagaataaatgtgattcatatctaaaatctggacatggaaaatggactaagctgaaaataactgttggcaaaaacataaagtagtatttttcaaaaggtaatccccctaaccagcagtgtcagcatcacatgggaacttgttagaaatgtaaattctcagccatgcctggtggctcacacctataatcccagcactttgggaggacaaggcaggcagatcatgaggtcaggtgatcaagaccatcctggttaacatggtgaaaccctgtctccaataaaaatacaaaaaactagtcaggcatggtggcgggcacctgtagtcccagctactcgggaggttgaggcaggagaatggcttgaacccgggagacagatcttgcagtgagccgagatcatgccactgcactccagcctgggtgacagagcgagactccatctcaaaaaaaaaaagaaatgtaaattctcagtcaagctccacctaagacctactaaagcagaaattcaagccctctgggtgatgcatgctaaagcttgagaaccaatggtacagactatgccaaaagtgtgtaccttaattacaaaaggctattaaatgggcactgtattagtccactctcgcgctgctatgaagaaataccaagactgggtgatttatatggaaagaggtttaattgagtcactgttctgcagggctggggaggcctcagaaaacttacaattgtggcggaaggagaggcaaataagtccttcttcacatggcggcagcaaggagaagtgccaagcaaagggagaaaagccccttataaaaccatcagatctcatgagaactcactcattatcatgagaacagcagcatggaggtaacagtccccatgattcaattatctcccaccaggtccctcccatgacacatggggattatggaaactacaattcaaaatgagatttgagtggcaacacagccaaactatatcattccaccactggccccttccaaatctcatgtcctcacatttcaaaacacaattatgcctttccaccagtcccccaacatcttagctcattgcagcatcaacccaaaaatccaagtccaaagtctcatctgatcccttttgcctatgagcctatgaaatcaaaagcaagttagttacttcctagatgcaatgagggtacaggcattgggtaaatacacccaatccaaatgggataaattggctaaaacaaaggggctaccagccccatgcaagtccaaaatccaaaagggcagtcattaaaccttaaagttccaaaatgatcccctttgactccatgactcacatccagataccttccaccagataccctaaattatctctctcaagtttgaagttccacagatctctatggcaagggcaaaatgccaccaaactcttcgctaaagcatagcagaaatcacctttattccagttcccaacaagttcctcatctccgtcagagaccacctcagcctggaattaattgtccatatccctatcaccattttggtcaaagccattcaacaagtctctaggaagtttcaaactttctcacatcttcctgtcttcttctgagccctccaaactgttccaatctctgcccgttttacccagttccaaagctgcttccacattttggggtatctttatagcagaaccccactctctgtagtaccaatttactatattagtccattctatgatgctatgaagaaataacctagacagggttatttataaaggaaagatgtttaattgactcacagttctgcagggctggggaggcctcaggaaacttacaattatgacagaaagggaagcaagcatgtccttcctcacatggcggcaaagggaagtgccaagcaaagggggaaaagccccttataaaaccatcggatatcataagaattttctcactattatgagaacagcagcatgggggtaactgcccccacgattcaattacctcccactgggtccttcccatgacatgtggggattatgggaactacaattcaagataacatttgagtggggaaactgccaaaccatatcagccattaatgcataaaattgtgttaggatttcacaagtagactttaattttaagtctattattttacctggaagacaaggtaagataataacttttcaaggtccaaggttttacttaaattagcagaagtgttcttagggctctgcagggcctggctgaaaaaaagagcacaaagtttaggggagatgctgccagaggcaggcaggtattcctcttgatggaacatttactctttactgtccaattcagctgacatcaaatttctctatagtcttacaccatgctgttttgcacatgtatattaccttcctggtctctggagatatttgaatattctgaacactatttagtctttttaaatttttttattttttatttcaataaattttgggggaacagctggcatttggttacatgaataaattctttagtggtgatttctgagattttggtgcatcaaccatcactcgagcagcatacactgtatccaatgtgtagtcttttattcctcgccacccctcaccctttcccccaagtccccaaagtccaatgtattattcttatgccttagcgccctcatagtttagctcccacatatgaatgagaacataggatgtttggttttccattcctgaattacttcacttcgaatgatagcctccaattccatccaggttgctgcgaatgccaatgttttgttccttgttatggctaagtagtattccatggtatatataaataccacaatttatccactggttgattgatgggtattggggctggttccatatttttgcaattgcgaattgtgctgctacaaacatgcatgtacaggtatcttttttgtataatgacttcttttcctctaggtaaatacctagtagtagaattgctagatcaaaaggatacttttagttctttaaggaatctccacaccgttttccagagtgattgtactagtttacattcccactatcagtgtaaaagtgttcccttttcattgcatccacaccaaaatcaatcaatttttatttttttatcatggccatttttgcagatgtgaggcggtattgcattgcattgttttgatttgcatttccctgatacttagtgatgttgagcatttttccatatgcttgggacccatttgtatatcttcttttgagaattgtctattcctgtccttagcctactttttgatgggattttttttttcttgctgatttgtttgagtactttgtagattttggatattagtcctttgtcagatgtatagattgtgaagatttttctcccactgtgggttgcttgtaactctgctggttatttcttttactgtgcagaagctttttggtttaattaagtcccatccatttatctttatttttgctgcatttgctcttgggttcttggtcatgaagtctttgcataagccaatgtctagaagggttttcccaatgttatcttctacagtcctcatggattcaggtcttagttttaagtctctgatccatcttgagttgatttttgtataaggtgagagacgaggatccaatttcattcttctgcatgtggcttgccaattatcccagcaccatttgttgaataaagtgtcctttccctgctttatgtttttgtttgctttgtcaaaggtcagttggctgtaaatatttggctttatttctgggttctctattctattccatgtgtctatgtgcctatttttatactagtaccatgcttttttggtgactatggccttatagtatactttgaacttgggtaatatgatgcctccagatttgttctttttgcttagccttgttttggctatgcaggctcctttttggttctatatgaattttaggattgttttttctagttctatgaagaatggtggttgtattttgatgggaattgcattgaatttgtggatcgcttttggcagtatggtcattttcacaatattgattctacccttccatgagcattggatgtgtttccatttgtttgtgtcatctatggtttatttcagcagtgttttgtagtttcccttgcagaagtctttcacatccttggttaggtatattcctaagtaatttattttattttattttttcagttattgtgaaaggggttgagttctttatttgattctcagcttggtcactgctggtgtatagcagagctactgatttgtatccattaattttgtgtcctgaaactttgccaaattcatttaccagttctgggagctttttggatgcatctatagggtttcctaggtatacaatcatatcatctgcaaacagtgacagtttgacttcctctttactgatttggatgccctttatttctttctcttgtctggttgctctggctaagacttccagtactttgttgaataaaagtggtgaaagtggacatccttgtcttgttccagttcccagggggaatgctttcaacttttccccattcagtataatgttggctgtggatttgtcatagatggcttttattaccttaagatgtgtcccttctatgctgcttttgccaagggttttaatcataaagggatactggattttgtcaaatgctttttatgcatctattgagataatcatgtaatttttgtttttaattctattcatgtggtgtatcacatttattgacttatgtatgttaaaccatctcatatccctggtatgaaacccacttgataatggtgaattatctttttttgatatgctattggatttggttcactagtattttgttgaagatttttgcatctatgttcatcagggatattggtctgtagtttcccttttttgttgtatccctccctggttttggtattagggcgatgctggcgtcatagaatgatttaggaaggattccttctttctctgtcttttgtaataacgtcaatagaattggtaccagttcttctttggatgtctgatagaattcaggtccaaatccatctggtcctggacttctttgttgacaattttttattaccatttcaatctcactgcttgctatggatctgttcagagattctatgtcatccgggtttaatctaggagggttgtatatttccaggaatttatccatctcctctagttttactaatttatgcatgtaaagatgttcatagtagccttgaatagttttgtatttctgtggtatcagttgtaacatctaccaatttttttctaattgagcttatttggatcttttttcttcttttcttggttaatctcgctaatggtccatcagttttatttatcttttcaaagaaccaactttttgtttcatttatcttttgtattttttgtttgttttagttttatttagttgtgctctgatcttccttatttattatcttctgctgggtttggatttcgattgttcttgtttctccagttccatgtgatgtgaccttagcttgtctatttgtgctctttcagactttttgatgtggcatttaatgctatgaactttcctcttagcactgcttttgctctatcccagaggttttgataggttgtgtcactattattgttcagttcaaggaattttttaatttccatattgatttcattgttgatcatttggaaacaggctatttaatttccacatatttgcatcgttttgagggttccttttggagttgagttccaattttattccattgtggtctgagagagtacttgatataattttgattttcttaaatttactgagacttgttttggggcctatcatatggtctatcttggagaatgttccatgtgctgataaatagaatgtatattctgcagttgttgggtagagtgttctgtaaatatctgttaagtacacttgttttagggtatagttaagtccattgtttctttgttgactttctgtcttgatgacctatctagcactgtcagtgcagtattaaagtcccccactatatgttgccatctgtctcatttcttaggtctagtatgagtaattgttttgtaactttgggagctccagtgttaggtgcatatatatttgggattgtgatatttgcctgttggactagtccttttatcattatactatcacctctttgtcttttttaactgctgctgctttcaagtttagctattcctgctcacttttggtgtccatttgcaaggaatatctttttccacccctttaccttaagtttatgtgagtccttctgtgttaggtgagtctcctgaagacagcagaaacttggttggtgaattcttatccattccggcattctgtatcttttaagtggaacatttaggccatttatattcaatattagtattgagatgtgaggtactattctattcatcatgctatttgtggcctgaataccttgtggtttttttttcattgtgttattgctatataggtcctgtgagaaatatgctttaaggagcttctattttggtgtatttcaaagatttgtttcaagatttagaactccctttgtagtttttgtagtgctgacttggtagtggcaaattagctcagcatttgtttgtctggaaaaggctgtatctttccttcatttattaagcttaatttcattggatacaaaattttggctgataatttttttctttaaggaggctaagaataggaccccaatcccttctagcttgtagggcttctgctgggaaatctgctcttaatctgataggctttcctttataggttacctgatgcttttgcctcacagttcttaatattctttccttcatcttgactttagataactggatgactgtgcctaggtgatgatctttttgtgatgaatttcccaggtgttgagtttcttgtatttggatgtatagatctctagcaaagctgggaaaatttttctcaattattccctcagatatgttttccaaacttttagatttctcttcttccttgggaacaccaattattcttaggtttggacatttaacatagtcccaaacttattggaggctttgttcattaacaaaattttttttctttgtctttgttggattgggttaatttgaaagtcttgtgtttgagctctgaaattcttccttctgctcatttgattctattgctgagacttaccagtgcattttgcattactctaagtatttcattgatttccagaagttgtggttgttttctatttatgctatctatttcactgaagaattttcctttcatatcctgtatcatgttttttatttctttaagttcgactttacctttctctggtgcctccttgattagcttgataatcaaccttctgaattctttatctggcaattcagagattttgccttggtttggatctgttgctgctaaactagtatgatcttttgggggtgttaaataaccttgttttgtcatattaccagaattgtttttctggttccttctcatttgggtagactatgtcagaggaaagatctgggattcaagggctgctgttcagattcttttgtcccactgggtgctcccttgatgtgctgttctcccttttcccctaggaatggagcttcctgagagctgaactgtagtgattgtttatgcttttctgggtctagccacccagcagagctactgggctctttactggtactgggaactgtctgcaaagagccctgtgatgtgattcatcttcaggtcttgcagccatggatactagcacctgctctggtggaggtagcaggggagagaagtggactctatcagggtccttagttgtgtttttgtttagtgcactggttttgtgttgattggcctccagccaggaggttgcgctttcaagagtgcatcagctgcggtcctatagggaggatgcaaacttgccctagggacacctggtcaagtattaaagtttctcaggtggtgtgcagggccacagagcttccaagagactatgacctttgtcttcagctaccacagaaggtagagaaagaccactaggtgggggcagggatagtagtgtctgagctcagcctctctttgggcagggcttgctgcagctgctgtgggtgatgggggtgtggttcccagtccattggagttatattcctagggggattatggctgcctctgctgagtcaaacaggtcaccagagaaatagaggaaagacagcagtcacaggcttcaccctgcttccatggagcctgcaatcctaaaggccggtctcacacttaccaagcaaccccgctcaacagcaccaagtctattttcaggcagtcagtgaccagggctaagaacttgccccagaccacaagcctccctgccaataagcaagcagagtcacagttttttggcatctcagggagcctgcagcagtgatccagttccttcaaagggtctgtggattctcttggctttactggtatgttcctgcagtagttctttttttttttttttgagacggagtctcgctctgtcgcccaggctggagtgcagtggcgggatctcggctcactgcaagctccgcctcccgggttcacgccattctcctgcctcagcctcccaagtagctgggactacaggcgcccgccactacgcccggctaattttttgtatttttagtagagacggggtttcaccgttttagccgggatggtctcgatctcctgacctcgtgatccgcccgcctcggcctcccaaagtgcctgcagtagttcttggagcaaaagttcacggtataagtctccatacactgcactgtctatgcaagcaggagctgcaagctagtcttgcctcctgtctgccatcttcatccctctcccctgtttggtctgtatgcaggatattagattgatgtgtctcagataatactgtgtagcagaattttcgtgatgtcctattctgcattcaacagaatgtttaatattggcacagtccaatagggctatcacaagacatgtgttgctattgagtacttgaaatatggctagtggaagcagaggaattgagtttttaattttatttaattttaatgaatttacatttaaagagctgcatgtggctagtggctaccctattagacagcataggaatagatatattgatctaatatcttacacaatgttgattaagtagaaaggtaattgtatacttttgaatagtatttagaaaacttagaaattgataaacctagaatagtctttttaaacattagtagggcacttttaggaccactccaaaagtgattatgtctaaatcatttattagaatagtgtgacaaagttaggagccttctgtttatgatgggtgttaagtcattctatgacccgcaggttttccgagactttttacaactgcagctcttagaaatctattttaagtgggaagaggttactgaacccaaatttgagaaaaatcgtggaaaatacaaatgctcttctacagaaatcatggaaaagcattccaaaaatcaaaatttatttttcatccttatgattgagccataagtcaccgatcaaagacctgtcataatcaagtttttcaaagggataagctataaatgaaataatttgaactttaaaagatcatatgtgactgcatctgagtaccatttgatgtgttattaatttattttttcagatgtttttaagtgtttggtaatttcctcgaccaaaaggaaagacactgaatccccccattttccacttaggatgatttcagcttatgaagtagtgacataagacctaggatagtctcttttaaaacataactaaaaattttttaagctttacagtttctcacatgaattctgaaagaacattgcttcaatttttaccttcttatcctctcatctcctttccagttatgagatattgtcagactcaagaatgagaatattgaaggtctggttaggttcaaggtggaagtaattatatttacccaatctaaagtattcatttcaagaatggaggtaagcaaataagaacagactatgaagttactggatattactggcctctaaactggagacctaggtttaattgtctctagaattattttgctggctgatgttctgcagaattggattgtgttgataaatgagtttgattacttactttcttcattgattctgacagctacacctgaagaaattattcaaagtgaagtattatttctaatctagatttcctatggataaagctttggcaaaatatttgccaatcttggcatttatgtattataaacttattaagtcagtgaatggatgctcagcatatgcagtttatatgactattaaatgtgtttccaatacctgaaggataagtatgcatgttgggagtgaagatacatttttatatcacacaaacagtaagataaagaataagagtatatttttattaaatgtaccaagggttgcagtataatctccaaaattaattgagatcaatatggctaaccatcccaatccccaaatatatcaaatgccttaagcatgtgcatttttttagctccacaattctattcttaaaaatttgttctatggaaataattatatatgttcatatttataaatgaaatggccaacataggtgagtagtaacaacaatagtagaacaatttaaataatgtaatcctcttcagcctttacaaataatattataaaacaatgattctaaataaagaagggaaaggggagtgaaccaaaatcatctgccaatttttttctttctttctcctttctttgggtttattctgttcttttttttaaaaataaaaaagttacattgaacatttggcttatcaatttttagcctttcttcataacgagtacaaatgtttcaggctttaaattttcattgatggctcacttttagccatatcacacaaattctaatacttatctttattgtcacttagttccaagtaatttttgtttccattattattaattatgtcttcacttatgagttacttagacagcagactttcaaaaaatttttagttagagattcagttgtttttaaaaaatcaatgtttttatttagtagtaatagtcacagaacatggtctgcctcatatgcttctttgacttttgagaccggctctttagtctagtcctaaccagaggtcaacttttataaagatttctgtgtgtttgagaagaataggtacttctaccttacaatgggtacctataatgtggtagggatgggggtggggtaaggaggtgaatgaaattttagagaggtaatgatggaagcaaagagaccagatagaaagctaattgcaataattcaggcaagaaatgatggtagaatggactagggaggtagtggtgaaaatgttgagatggaattagattctggatatattttgaaagtaaaaccaacaagatttcctgaaagatttgatgtggagtgcaggagagagaaatcttagcctgagcaactggaaggtagagatactattagctgagatggggaggactgcaggtggatcaagtttggggtagaagacccaaatgttaggcaccagaaatggagagttagagtagacagcagttcaggggaaaggtctggactggagagatacgggatcatctaggtcagtggttctccactggggtgcttggggcaagtgctatgggcatctagtgggtagacatcagtgatgcttctaaacaccttgtaatgttcaggatagtcccttaccacaaagaattataggaccgaaatgttaacagtaccaagactgagaaaacctgacctaaggcctgagcataagagaagaaaaggtgctcaaggactcagctttggggcatggcttagtaggagttcaaagagatgagaagtatctatcagataattctaaggtgtgtgtctagtaatactgggggaaaaaacaggatagtcttatgtcctgaaaggcaagtatttatagtatattaaggaggaggaattcatcagccttgtcaatgctgttgatagatcaacaaagatgaggactgaaaattgctctttgaatttaccattgtggggtaattgaaaagaccccatattaacaagagtaatttcaacagagtggtgttggcaaaagtctgacgctgttacttactgactgagtgacttagggcaaggtacttagcctctctgagttttagtttcctccctcataagctgaaggtaataatctacttcatagggttgcatgagataatgggaataatgaggcggagcacagtggctcatgcctgtaatcccagcactttaggaggccaaggtgggtgaatcacctgaggtcacgagttcgagaccagcctggccaacatggtgaaaccccgactctactgaaaatacaaaaattagccaggcatggtggtgcacgcctgtaatcccagctactcgggaggctgaggcaggagaatcacttgcgcccaggaggcggaggctgcagtgagccaagatcgtgcgcagtggtgcaatcttggctcactgaaacctctgcctcttgggctcaagcgattctcgtgcctcagcctccctcttgtgcctcagcctcccgagaagctgggactacagggtgccatggcactccagcctgggcgacagagtgagactctgtctcaaaaaaaaagaaaaaagaaaaaagtgttggggaggggggataattacgtgtaaagcacctatcacagaactggcacatagtaggccctcaaaaaatctaaaatctccttccacaactctcccattcatctccagtttctctcctcctgcaacccctcctacatttcccccacacaaaaactactacttcaatgttttatcaatactaaatactatttagtattataagaggcaattctctcattaaaatacactttgtgatggggaccatatttcaatgatcccttattattaactgaagaaaaagaaaaatgttaataatttccggttttccgtataaggtaatacattgaactgggagaaaaacaggtagcaatttaaaaatacagagtcacaaagtaatttctcattaaattaaatatttcattgttgaattgaattgtttattaagtcttttttcggtttgaaactgtgcaaacccaaaccagtagctccattttctaggcctactgaagttccctgtacctttcccacataaaactactatatacaaaactttcaatcaaaaccaaaaatccccggagagacatgtcaaaggatggggattggattggggaaagctaaagacatagaaaatttctctttaaaatgttttactctggaatttcaactggttttgtcttctcttgggattcagaaaatgattatattaactctaatgattttatggtgactttataaaaaatggatttaattttaaaaggtcaagggtagccatattctgagaaaaaagatatctgaaaatatgtcattctgcatgcaattgtaatttccacagaagtaaaggcctgggaggtcatccaagtaatgagatttcatgctaattccccagttagtcacacacagtgagctcacagtccaagtggcttcagacttctctcgaagctgaggtggctggagaggaattctccatgatttagaacttcagggtaccctgatgttgtcctaatcagcagcctgattctcctatctgctgagcccccaaagagaggtttttatctccctatctctacatctactatatttcattgagtctaagacacacattttattcatattcttcttatgtcttggaaatcaggtttcatcttataatctattgctattggtcagtctgtccagaagaacactttgtgtgatggaaatattctatatctgttccattcaatatggtcacccctagccacatatgtctcctgaggacttgaaatatggctggtgcaactaaagaggtcaatttttaattttattttattttcattgtttaaaatttaaatagccacatatgtctagtggtgggcctaatggacatcataggtgcaagtcaaattcttaaaggaaggatttaactttgtttcttccactcacttgagaaatgactaacttgagactcctttaaattaaattttctgtttgaggttttttcactgcaccagtagtgagttcagactgaggccctgagtacagtagttcccctttatctgtggtttctctttccagagtaccagttgccattggtcagccacagtctgaaaatgttacattactactcatgccctttggggctatgattaagtaaaataagttacttgtacaaaaacagtgtgatactgtgacagtagatctgatcatcaagatggccactaagggactagccggcaggtagaatagatggacaaagggaatgattcgtatcctgtgttgcaggacagcgtgagatttcatcatgctactcagaacacatgcaatttaaaacttacaaactgcttttttctggcatttttcattaaatcacaatgcctacatcattcacctcacttcttctcatcatatagcaattttatcatctcatatcatcacaagaagaaggatgagtacagtacaataagatattttgagagtaagggagagggagaaagagaaggaaagagggggagagagagagagagaacgagagagagaccacattcacaaatgcctattacaggcatacttcagagatgttgtgggtttggttccaaactactgcaataaagtgaatatcacaataaggagagtcacacagatttggggattttccagtgcaaataaaagttatatttacactattgaccaggcacagtggctcccacctgtaatcctagcactttgagatgccaaagcagtcagatgacttgaggccaggagttcgagaccagcctggccaacatggtaaaaccccatctctactaaaaatacaaaaattagccaagcgtggtggtgcatgcctgtaatcccagctacttgagagactgaagtatgagaattgcttgaacctgggaagcggagggtgcagtgagccaagatcacacccaccgcactccaacctaggcaacagagtgagactctgtgtcaaaaaaaagttatgtttacagtatcctgttctttattaagtgtgcaatagcattatgtctgaaaaaaaaagatgaacataccttaatttaaaaatattcttgctaaaaaatgccaataatcatctgagccttcagtgagtcataatctttttgctggtggagggtgatatggtttggctgcgtcccctcccaaatctaaacttgaattgtatctcccagaattcctacgtgttgtgggagggacccaaggggaaatgattgaatcatgggggccagtctttcccgtgctattctcgtgatagtgaataagtctcaatgaaggcagaaataaagatgttctttgaaaccaatgagagcaaagacacaacataccagaatctctgggacacatttaaagcagtgtgtagagggaaatttatagcactacatgcccacaagagaaagcaggaaagatctaaaattgacaccctaacatcgcaattaaaagaactagagaagcaagagcaaacacatccaaaagctagcagaaggcaagaaataactaagatcagagcagaactgaaggagatagagacacaaaaaacccttcaaaaaatcaatgaatccaggagctggttttttttgaaaagatcaacaaaattgatagaccactagcaagactaataaagaagaaaagagagaagaatcaaatagatgcaataaaaaatgataaaggggatatcaccactgatcccacagaaatacaaactaccatcagagaatactataaacacctctatgcaaataaactagaaaatctagaagaaatggataaattcctggacacatacaccctcccaagactaaaccaggaagaagttgaatccctgaatagaccaataacaggctctgaaattgaggcaataattaatagcctaccaaccaaaaaaagtccaggaccagacagattcagagccaaattctaccagaggtacaaggaggagctggtaccattccttctgaaactattccaatcaatagaaaaaaagtgaataagtctcatgaggtctgatgggcttatcagcggtttctgcttttgcttccctctcattttcttctgttgccaccatgtaagaagtgcctttcacctcccaccatgattctgaggcctccccagccatgtggaactgtaagtccaactgaacctctttttcttcccagtcttgggtatgccttcatcagcagtgtgaatatggactaatacagagggtgttgggatgttgcctcaatgttgatggctgctgactgatcagggtggtgatcacttaagattggggtggctgtggcaatttcttaaaataagataacgattacgtttgccccgttgactctttatttcatgaaagattcatttgtaccatgtgatgctgtttgacagcattttacccatggttgaatttctttcaaaattggagttaatcctctcaaaccctgtcactgctttatcaactaattttatataataatctaaattccttgttgtcatttcaacaatgtttatggaatcttcactaggagtagatttcatctcaagaaactattttctttgatattcataagaaacaactcctcatccattagttttattatgaaattgcagcaattcaatcacatcttcaggttctacttctaattctagttctcttgctatttctaccacatctgcagcttcttcctccactgaagtcttgaattcctcaaagtcatccctgagcattaaaatcaacttccaaactcctattcatgcttgtagtttgacctcctcccatgaatcatgaatgttcttaaggcatctagagtcatgaatcctttccaaactattttcaatttactttgcccagatccatcagagcactatctatagcaggtatgccttacaaaatgtattccttaaataagaagactggaaagtcaaaattacaccttgatccatgggctgcagaatggatgttgtgttagcagacacaaaaacaacaatgaatctccttgtacatcttcatcagagcttttgggtgactaggtgtgttttcaatgagcagtaatattatgaaaggactctacttctgagcaatgggtctcacagtggactctaaactttcagaaagccacgctataaacagatatgattgtgatgccattcaggctttattcttccatttatagcacacaggtagagtagatttagcataattctttttcttttctttttttctttttttttttttttttgagatggagtctcactctgtctacccaggctggagtgcagtggcacaatctcagctcactgcaacctctgcctcccgggttcaagcagttctcctgcctcagtctcctgagtagctgggattacaggcgcccaccaccgcacctggctaatttttgtgtttttagtagagacagggtttcaccatgttggtcaggctggtctcgaactcctgacctcgtgatccacccacctcagtctcccaaagtgctggcattacaggcgtgagccaccgtgcccagcaatttagcataacttttaaggaacctaagattttcagcgtggccagtgagcatggacttcaacttagagtcaccaggtgagtcagcctgtctttcaaagatctgaagccgggcattgacttctcctctctagctaagaaagtcctagatggcatttacttttaatataagactgttttgtctatattgaaaatttgttgtttagcctagccatcttcatcaatgatcatagctggatcttctgggttacatgctttagcttctccatcagcacttgctgcttcactttatacttttctggtatggagacagcttctttccttaaacctcatgaaccaaattctgctagcttcaaacttttcttatgcagcttcctcacctctctcagccttcagagaaatgaagagaattaaggacttactctggattgggctttagcttaatggaatgttgtgactggtttgattttttatccgaaccactaaaactttctccctatcagcaaaaagtctcatttgctttcttaccattgatatgttcactagagtagtacttttaattttcttcaagaatttgtttattgtattaacaacttgactaagcgtttgttgcaataggcctagctattggcctctttaggcttttgacttgccttccccaccaagcttaatagcttttgatttaaagtgagagacatgtgactcttcctttcttgaacatttagaggccactttagggttattaacaatattggcctaatttcaatattgttgtatctaaggaaacaggaaggcccaaggagagggagagagatgggagaatagccagttggtggagaagtcagaacccacacattaattgtttaagttcactgtcttatagggacacagtttgtggcacctcaaaacaattacaatagtaacatttggatcactgatcacagatcaccataataggtacaataataaagagaaagtttgaaatattgcaataatcaccaaaacgtgatgcagagacatgaagcagcacatcctgttggaaaaatgacactgatagacttactcaaaacagggttgctgcaaactttcaacttgtaagaaatgtaatatctgagaagcaaaataaaacaaagtgtgcctgcattgattgtttttggcaatctcttactgtgcctaatttataaattaacctttatagatatatataaagaaaatcatagaatatataggatttagttctatccacgacttcaggcattcactggaagtcttagaacatatcctccatggataaatgggcactactgtaccagctttggttcaaatttttggaagagattttttttcctgtctctagccaataccaaagttgatatatgtacattttcttactgtcccgttctgcatagtgagctttttttctcatttactcttaccctcaaagggtaaatctataatgtctcagaattaggtagaagtctcctgttaaattcctaattttggatgcttttaactttatagtaggacctgaaataatggtgcttccttcaatcaataatgacttcaagccaataaaatatggtaatataatttatgatacataatagaggcctaataaatgtttgtttagagagaatggagaagggatgaaaggactaattgggcaatagagtttggatgtttctttaaataatagttccttgaccccatagatgtttgaggggaggagtgtggttaattgtactgttaacttttgtttagataagaaaaggaggagttggataagttatatatgagaccctggcaaggtgcaaagagagagaaaggcttaataatggaggtatcagtcagagttctggcaggaaagagatggcaaacctagatggatggaatagcacctgccatggcctgtttatgaactggactagagctctgtttgcatagggtaaggaccagaagctaaaaacaccattttgaaaatatctctatgagcttctgtgcatgagaagtgcagttctggggtcaaggcaacaatgatacatcccatgagacctcacagtttttgtagcacccaatcagataatagtcacctggtaaagtgctatgtgagtgtagggaaagagcacgttttaaatagaaccagtcttaggagaaacgttattccgctgaagaaactagaaagcacaggcaatgtttgcctcctgaaaaattactccatgttaagatttataggttctaggtctctcaaattagttgaatctacttggacttggggttgaaactcaatgtatagtaagttccattagtgataaaagagaatgaaaagaatatggaaagttaataggctttctagaaaatatagccatttgttattatggttcattattctgctatgtaaaaaaaaaatggttaaattgaggaagggacaaaaaaaggctctggggaaaagggtatacttttcatggtaagaaaataaagtcctgtgttttctggtgcaaggacaagttacttctccccaaggtatgaccctggcaatttctggtgaaagccacaattcctagaaacccagacccagatatcagcagttaggaaaatatgtatcttatggttaaaatgagaaagctatgttctaaggccatatgtagcaatgggacacagtcacaaggaagagagccagggtctgagcagcctcagcaaacttggtgcgtgagataagcaatggtcagaaagatggccaagtcagactcagaaaacccaggtggagtcatggcagaacaaaaggaaacaaaatccaaattcgcagacaaaactcagaaagacaccaatagcagtgagtaaagcaaggccaggcacccaaaactaaggaggatggtgagaagggtcagcccttccagagccaaagagcaggtcaaggtggtaaacaactgccgtgacaaataaggagaaaaggagctatactctctttatgttttacccacatcgggtaatgcctcatacagcatagatacccattaccgattgaatgaataaataggcccaacaagcagatttagaacattggaaacaggtcttcctagttcagccaactgaactggtttagctatcacctaaatcagtgcttcttaaactttaatatgcataaaaccacctggggattttgtttaaatgcagattttggttcaataagtctgggatgcaacttgggaatatgcattttaacacagttgtgaccgctatgctgctgatccacagatcacactgctccacaccaggatttgaataacaacagccttgacacagaagcttgaactagctttttgttaaggcataaatcaatttcaggagggaggactgcaagtagaaataaagaagcacctgccaggagtaaggaggtgaagtctagtcaagaatgacagttcttgagaggagtgatttgagaaactctcttgtgactgctgacagctcctagcccagcaagaggagacctgggtagctcagaattgcacatcaagatttttttatttttgaggagggaggggagatagaacatttaaaattgtttactcacaggagccatcacaagttttcataacctgaacaaaaatcatcacccaatgaaggatttcatttcagcacactccatctgtcttgttgcataaaaataaaagttcagggtttcttttttttcagtttaagtatgtcactacagtagagtttagtgacataaaaagatgatataaaaatagaattgatggtgtagcaaaaggtagaaatggggactttatagacatcgcagacagaattatcatattaactctttgtagtctccaattaaatacctggcccctcctctgtccttgtacttaccgtcctctatgaactatagcatttggtctccatttaaggaaaatttgcatcatgcttctgtctcttctagacacctattgatgcggctaccaagcaacagaacaacaacagcaacaacaaaaagtgatgaaacccaacttaagctatgataaacttctgtgttctagggcagtactttcagaatcacggacagcggcaaactcctgtggaggcagatctctttgatttcagtatgggccttgcagctatctccctcttgccactgtgcagaggacaaccatttttgacctgctgtaagtgtccaccctctcctgtcaattatttcccccttccctatattataggactgttccccactgtgcatatacatagaagccaacacagactttttcccataagcaggtgttgcatatatattcctagaattaggcacccatatattaaacaagttttccaggatgtatctgtagctcctagactgtttcacattgaatgcctgctctgcttcagtatgtctctctcagctactgactgtcaacctacatctgttcatgtttattaagtctaggagatggccttcaagacttttaaatgagcgacactttaggataggattcacaatatgtttcatagtataacaatcttaagatcatgtgtgagtaatcaacattctaatttattgataactgagcaaacttaagttgccattcttcctagtgtagtatagcaaatgaaaccatgtttacagcaggggattaactccatttcctaaaatcaaaattgggagtaaataagtgaggtaaaaggaggttcccaagagtgatgaaaccagacaagagaccacagccagtggtctatccttatatgaggccaatgcttacaaataataaaccgtctctgagttacagagactcaggagacatgggcttaagaagctgattgattacaattagggaaagacacattggaatgtgacagctaagaacatttcttttctttttttcttttctttttttttttttttttttttgagacagggtctggctttgttgcccaggctggagtgcagtggcacaatctcggctccctgcaactgcagtctccacctctggggctcaagccattctttcacctcaacctcctgagtagctggaactacaggcattcaccaccatgcccagctcatttttttttttgtattttttgtacagatggggttttgccacattgctcaggctggtctcaaactcctgagctcaagcaatctgcccaccttggcctcctaaagtgctgagattacaggtgtgagccaccgtgcctggcctacattccatttaatggcataatttttaggaaacattattgtaatttcctcagaataggatttatggactacaagtttcatggggaagattctccaaagctggccctaaaacctgcagtatctgagggataatggcctagaggatatctgacatggtagcattaagagaagtaagagagggctgggcatggtggctcatgcttgtaatcccagtgctctgggaggcttaggcaggaggattgcttgaggccaggagttcaagaccagcctaggcaatatagcaaggtcctgtctctacaaaaaaaagttttaattagccaggtgtggtggtgcacatctgtggtcctagctactccagaggctgaggcaggaggatcacttgagcccaggagtttgaggctgcagtgaaccatgactgtggcactgcactccagcctggatgacagtaagagaacctgtctaaaaaagaataaaaaaagagtaaatgaccataggaaaggcacagtgaagtggaacattgtcactggcagttataaggaacagaaactccatgggtctcagagtcaaaggaagacattagggcttattcacccagaaatgcgtgctaagtcaaggtcaaaacaatcaactttgaacttgggtcttagttttgcctccatgctggtttttgctaaggatccctcttggatacaagagccttcctactcatcatggaaataacagacaaaaaccacttgatgatggtgttatgagtttcctattgctactgtaacaaaattaccacaaaattggtggcttaaagcaatgaaaatgtattatcttatagttctggatattagaaacccaaaattagtctctctaggctaaaacagatgtcagcagagctgcattcctctggagactctaggaaagaatcatttgctgttacttttccagctgctagaggctacctgcgtttcttagcctgtgacccccttctagcaatcacagcaccctgacctctgcttccattattgcatctctttctttgattcttactcacctgccctctattataaggactcttgtaattatattgggcccacctggataatctgggcttctattcttgtctcaaaatacttaattacatttgttaagttctttttgctatttaaagtaacatatccacaggtcccagggataagggtatggacatacttgaggaaccattattctgcctaccatcagccgtgtcttcactgaaggacaaaaagcatttatctatgctgaacatggtgagtaactcaggacccaaagagctcaaggaaaatggctcactattccaaaagtaaaaggatttaccgtagcctagtttgtcaatttaaaacctttaaacacttaacatcacttcttgctccaagaaactctctccttaaatcattttcttgcaatacatcatcattattttttaaattaaccaaacaattacagcaatttttgtgttctgaaaacaggaacatgatagttggcttctctcccagaaaccttttacatttctttttacctatgagtgttatgaaaatcatctccaacatatgcaaccagagcagcacactagcatgctgctgtgtcctggctaaaactctcctgggatgctcacacccgagagagcctggcagaatggccactcactacttttgcccaattagaggaggattttgttgctaggcaggggtttacgcttacaaaacttcagacagaaatgctaatcagagactgaaggcttcacttctcctgcaatcagtcaagtcctgtcaattctacctccttaatctctttccatccctcccctttcctctctaaccttatgccttttctcaaggcagtgtgacacattgcagggattccccaaaatgacttgatcgtattaaccatttagggtgtatattaaacatgcagattcctaggcacctcacttaaaattcttattctaagtcttggcaagggctttggaatctaagtgtgtaataaatacgccaaagtgactcttattattaggctaggatgggcaaaactgacatgatgaaataggacgggcttagaaatcaggcacacctttgtttgaacaaacatttttcaagccaatgaacttggaaaagttacttagctactctgatcctgtaaaatgaagagttcattggttggagagttgaatggaatcgtgtgtgcatttcaccgcacacaaagcccagagttcaataattgtgaattatcttctcttaccgcccttcatgtctctccctatattataatacctgtcatattatagtttttacagctgagggatgctgactgactctgcaaatgtcacagaaagacaaccagaaacacttgtctaagtcctgtgccaggaccttccctatttgtccagttgtcagcttcatcgtgtaattacacaggctttcagagctctccctgctacacagcttcctctcattcacaagaaaatggtgggcttaatcatgtgagaccttgtacaccatcatggggatttaggctttttccagtcctttgtgattttcctttcctaaggtcttcaaactagatatccttatctgcctccctattttacctacaatcatatccccttccccaacaattgctcccttgcaagctctctgcttgaccaggtcattttcctcctactctatgggcaacaactttacaagtttgtccacaatgctttttacctgttcacctgccacactgttcttcaaagctcacatcatattgctttccataaaaccttccacaatatccctagactaacaccccaggaatacaggttgtccttaaaccttgggttacacacaagcctttaaatatgaaccactctatggtgttcagtcagccggtagtcatgggccaatgctgtctctctccttgggaatggggacctctgcttctcccacctcaacagtgtatgctgtatgaacacacatggctttgattgatatgccaggcattgtgaaatgccttctctaacaaatacttcaggcttgaacacctaatcttgagtggtaatggaacaggtttctgggagatcagaacaaatgcagagaaaacacattctaccttaaactgtactttctttccataaatatcctagaaatgctgcaagaaagccccgatactgtggaacatacaggtagaaaactgaaggactaatacaatttccagtagcccaaaggatagtaagcaagaaaatgagttgtgtccacagttaataataataatgtgttgtatacttcaaaattgctaaaagaatagatttgtaatattctccccacaaaaaagtcataagttggtgaggtgatgaatatgttgcttagcttgattgagtctttctacaatgtatacatagatcaaactatcacaatatacctcctaaatgtacacaattattatttgtcaattaaaaatacatttaaaatgagttaagcatccctttctatgcttttacagctgcctctgccttcccaaactaccccagtattcactcccccacaccttgggtagtcagccaaagtctcccactaggaatttcttgagacattccctgtatctccagtagttatcttatacccagttccaaagtgatgtctcccataccctgagctcacctccccatacacactaaattgtaagtttctggaaaacaggtaccacatcttgttatctgtgtgtcttcagcatttagcacagtatctgtcacacatctgctctggaaatggagtatgtatgaatgaagaaattaatgaatgaatgaatgacttgactgatggtgagttaatattggtgtcaaacagaaccctctgaagaaaatggtcacagtgaccaagcaaagactcagaattaaagtctttcactccatggagaaaatggtttgttggaaataaagaaagttcccaccttccaaatggaacccgtatataacccagtggaaattatgacttaatttgaggagaattcctataatagcaacatgttgtgcagaaaactgaagatacaaaaaagactttgtccttaaggatgggcctctgctatagcacagggagtgtggcatgggaagaaagtgagggttatgataaagatcagcatttctattgaaaattttagtctacacattgttttcaaataaattatttattgaaaaggcgtctgtattagaaatcagagtatctgagtttccaaaaaagaggcctcacctccgatctttagcttcttcacctgtaaaatgaaaagatctctacccatctgcctgggttgttggggggatcaaataagaaagggatgtgacagcattagagctattagaaacagccccacaaaataagtgactgaataagtcagtaagatgaattttttactgcatctgagctaagagcaggtagagcaaggctttaaaagcaatactaccatgaataaattgtgtggtgttggttaagtaatctccccttccacaaccttagttttctgatccttaaaattagagggtaagagtggaatgatctccaaattaccacttaacctaagatatgattcctaagaccaaatagagaaaaggcaaggtaagttcccgtttaatgaatcaaagaataccagcttccttggggcattcatcagaacagagctcaggtcctataaatctacatcatacaagtgacaatcagaagcacattgtcctctagcctatgttacagctgtgcttgttagcagcatgtccctagccctcattatccccgatggacctgaaccatttggccaaagccttacagggattgccagagctcatagttatttataggtgcagttcatcaaaggctttgagctttcctttgtggtgagagctgatctctttgactctcactctatacctttttcttttatgttctgtctgttctttaattccttgcatttttatgtgccttcagttctgattaattcgaagctgtacagattttaccatactgattcattggttgggagggatcaacaagaggaggagagaaatactataccaattcagcacacagaaaaccttagctcagagacctgaaatgaaggtttgagggtaatgggaccaagaagcatcacctgtgtgccaaatctgtcactaggaacttttcataggagtttatgttgcttaggctatttttatccagaggaatttgggttacctctagtttgggaagattttgcaagaattcacctgaaaaaattggaaagacaggaaatctggccacactcccaggatttctggaagagctgaacagccagggctcacagtccttattaaatagctcaagactcagaaaaatctttcagaactcagagcagccctaacaactgggtcatctggttaacctcctaggcagcagaggttcgcatttattctcatgctataccattatggcaactcagctatcacattgttttcactattctcttgctcctactcccacagctaactgctttattctttttctctgtctcaagttctgattgtttcagttagtctccattgtttatgatgagtaaaacttctacatcaagtcacctcataggctctggtcaatgtacagcttggttgtccttaaacaaggtacccatttctcgtctttcatctgtggccaggggagcatgggcatgagataccattatagcaagttatatggagagaaaccctcagaagggggctgtggcgggggtggagtagcaaatgttcttttgtgtgtgtgtgtgtgtgtgtgcgtgtgtgtgtgtgtgtgtgtgtgtgtgtgtgtgtgtgagagagagagatggggttttgctcttgttgcccaggctggagtgcagtggcgccatctcagctcaccgcaacctccacctccaaggttcaagcaattctgctgcctctcagcctcctgagtagctgggattatgggcatgcagatgttctaaagcctagactgcccagtaaagtgttcaaagtcagtgtcataatagagcctgagatgcctatataaaccaaacttctcttcctataaaaaacttatgatctataaaaataaattccaactcaaaaagcacataaacaaaggttttaagaacacttttatgtaccatgttattattttacaattcattctataccactctattattcattgactaagggttcttcaattagtgaggttcctaatgtgttaaaatacaatttactttatcaaagtgtagtggtggcataacttctaagcatcatctgttagaatgaagtacacacgttcaaggttgcattttatttaactaatggtattgctatggtattattttctgtgataatctattgcagaactgagtgctttagatacattccatgagaccagggcttttctatgagctggagacctaaactgtatttacaacagtgttaaaggctctgctcatcacagcaatcttacggtatttgattctctccatgtcttggtaaacagtgcaaatatgagggaaaggaaactgtatatttatctaagacagtggttctcaaaccatggtcctaggaatagcatatcgtcatctgagattgttcaaaatgcagatcctcaggccttaccccaaacttactgaatcacaaactttgtgggtgggtccagaaatctgtgttttaacaagccccccaggtgatttatgtgcatactaaagtttaagaatagtgatctaggatacttgtgtgagcttcctaagaccccagggagactctattttccctgagaacaatgcagtatacccataacttggctaagaacaagagtattaaaaacaagatattaagacatcttgaacaaggtattaagacattaagaacaagtattaagaacaaggtaactattgtatctctagttagttctgagtgagggtcaaatctgggaggaagccctacctaaggatgaatgccatatacattggttctttttcaccattctctgtccttcccttctgcttcagcaggctgcccctgaccccacctcatgtctaatctccttcagtttcctacatagaattttctcctacttcttctgtcaaccccaagtccaaatttcctttcagacctacttcaaaaacgactccctacaggaaatggtctatattgtctctcaattacatccattaagcatttattaaacacctactttttttcctggcacaagttaaagagacacatgagtatcagacactgttctcatgtccaataaggatgcacaacaaatcacccctctcctttgctttcactcaaacctttctctgcagttcctagtaagttatcacataatttcactttggttttcaccttcttccagcatatatttatcttctctgctgtttgacaggtttcttgagggcagtgaccatgattttaaactcatttgtacatagtatgtttcctaacagcctactgagcacatgctggggacatgttgggtttaatgaatgagatcacaaaacaatagtatagacatgtgcagaatggattctataccttcacagtaagtctcactgtcttttatttctctgccttttgatccaccccttacccactgacttgggctacaaaccaataaaatcctcaagacaactcatttgcctaaaggtggattcatgtttctctatgcggggctggtgaggaatccaaacaagtgccaggccagccactgggccaaatgacaatccaccaaactcttaattaagtttaaaaatacatcttaaatactgttctttggtacccctttttttggttggaatgatgtttgggcttaaaaaaatatcttgtagaatcctgactcagggccaaaggatgaattggatgccatcaattaatggagttagacagaacctgccaaataaatgacctgtacatgaccagaaagacacaaaggggagtgatggtctgtttagcagtgatgaggtgtccaaatttttcagctgaactaggttacaggccaagctgtattctccaagaccagctgcctaaaggttgcttacaaattcccttttgactcacatgccaaagcaatacttaggtttacagagcacatacctgcctgccaaggtagttatttgcaaatatgaacaacgttttgcaaggctcatatttgccaattttcccctctttatagatcaaagctgcagagagcatcataaaaactaaacttctaggtaaagacagaaagaaaagaaggcaagattcctgtggctctcttggaaactcatgctgagaaaatcatcaccattttatccataggatgttggggtcttgagtcatcagaagactttggtacctgctacctgatcttggggctttagtgaagccacaagaaactagaaggacttgccatgaaaaatgtatggttttgtgaaaaacagagatgagatggtaatctcacttaggctcactaaggttgtcagtaggaggaagaacctctggtaagaaaaagaagctcaactatagaacctggaattgctaaaactattcactaattagcagcctcagatgtactctgttttcaaggtaactcaacttcccacttaactctgacccaaccatggactcctctgggtactctgtggccaagctgtgacaagaccagatcattcaaaccaaatgtctctgaaagacagaagataacacagagaaaataaatctaggagttgtatgaaactagaatgatcttgtttacaagatacgacttcctcttcagggcttgcagttctgcagcattgactaaggtaatgacattcaggtagttcttttcctcctagcacacatgctaccatcagtgtgttctagacatacatgcctcctgactcagcagactggagaccaacaataggaaataggttttaattttatttttcagctgtgatcaatagacaacaactaactgctatgctggattgaggaggagtctaacgtaggttttatctcagctcagtgaggaaattatatgatggattagtgatgtcttgcatggatgaagataagaggataaagagggagtaatcgggggatgaatgataatgcctgtgcccggtatttgccatcctagtctagatctaagagagagatgccaagagagaggtacaggattctctctttcaccactctatggatctgactcctcttccatgacaaatatgtgaattaaggcctcctcacttcagggaaaaccttacctaaccacagaggcccaattgccatgtgcaaccatgttagattattgcatagtagcttcaatattcacacaaaagaaacactagtattttttttttgacacacagtcccactctgttgccaaggctgaagtgcagtggctcaatctcagctcactgcaacctccacctcctggattcaagtgattctcctgcctcagcctcctgagtagctgggattacaggtgcccgccaccacgcctggctaattttcatatttctagtagacatggggtttcaccatgttggccaggctggtcttgaactcctgacctcaagtgatctgcctgccttggcctcccaaagtgctgagattataggcatgagccactgcacccagcccatttttattcctggaatgaattatgacagttatcttagtcttccttttggtcacacaaaacctggagtttctaaagttacaaatagctatcacaggcaaagaagctgacccttctgggttactgtaagctttgcaaaacagtccatacttggagagaaaacctgacttgggctcatttaccgtgacttgggcttatttgtcgtgacttgggctcacttatccttgctcatggtgaagtttataggcatttctcatttctggcaagctgagagaggaggaagagttacaaaatgacttcagtaaggggaaactattgcaggagagtgcaaattgctagttttaaatacaaatgtcagaagaaagtctaagtgaaagcaggggctggtatgcaaaggaaaacaattatgaatggggaagacctaaaaaaaaaaaagacattctagatcaagaggaaaggagaggtcctccatatgcccacacaaaggacatcggttaaggatcatgctagacagcaagattggactgaatctcaaggtgtagcaaccagcttatttaaataagtaagtccaacacttatagggactttagatctaaacagccaagagcaacaatcaagacagggaagtgctgaaacatcacaagtcaacctccatattccacatgtggcccaatgacaagcatttatacaatatgattgattaccctgtagtttactttgtcaatcagtcatgaagttaattacatattactcttgggcactattataaataagggtatagcaaatagtgataaatttaatggtccttagcattcagctattaaattgatgacacagtcatatcagcattgatgaacatggactttcttcatcaaggataatttatatcaataagtataatgggctatctcattctcctttggccaacacattattcacactgttataggcagtgaatctattagtaaatgaggaaaaaatacgttttgttttctgttttttaaaaaaagactcctgataaatgctgattataagaaaacaggaattttatatcacggacataaaggttaaagaaaatgtgagctcaccataaaacttgctgaaatggaaaattaaggtggattctaaagagataacctgcatccaactgtggcttctccaggaggagcctttgaattgtcctgttcacctacctagaatgctcttgtcttccatccactccccgtacacttggatgattccattcctccatcagtcattgttttagatggcatgtcttccaagaagtcttccctgaccttctggactgagtaagatgccaatcttaggtcaggtcctccagaagcaaccctgaaataaggattcatgtgaaagtgtttccagaaataacggataggagagtggaaaattaggaccagagaggagaaggagacaagcaaaagtaggatataaagcaaaatctcaggagaattttggcccaatcctgccagggatatctaaaaacagtgtagtcacatctcagttgtctcaatgaacaacatttaaaccttgctgtgtgtcagtcactggtaaggatttctccaagcacttccagtactgcacactcaaggagaacaatctagcagtctcaggacagccctccaacaaagaggctgaggtgctgagtgttgagagagaaaagacatcaggaactctggtgtgcctcaaaatgataaaggaattcaatgtgacagagtagaacatattgatagtatctgcttcactggccctgcaaagggttcctgtagcaccctgaagactctctaagatagcatttacaatgctgcattgtagttgcttagttacttatctgtgtttcttgctagattataggctttgtgatggaaaaagcaatggctgccttgttcatcattttatctacagtgactagcacagtacctggcccatggttagtattcaaaaaatatttgtgaaaggagggaaaaaggaaaggagagggggaagtttgtttggtggaagtattatactagtgtaatacattacacactcaaacaaaaacgaatcttggtaaaacattattcttaaaggaattatgcaaacctactttactcattctgagcatgaaaatcttggctgtaaaagttggatatcgtccatgcagcccaagagttcatttgtaacagtccagtaggggctcttatatcaactagatgaggggagaataataaaactcctggtctggaatgaaagctatagccattttactatatggtcaacctgaacaaacacaaatatggcaacaataatgtttatattaattcctagcttgtttttatgaaatattcttgaaaattcttagctaatgtgggctagagaaccagctccattccaatcacatctagattgtattttaatctttcattattcccttacatgtatcatttaacatgtattttttaaaaactaaattctcagtggcttagtaaaatgaagatgtgtttcttagtcaaaaaaatctaatcaagtttttcttgggcagtcttcatacaatgattcaggcatcctggttttaaacacctgtgtctttatcatcccaccttcttctaaagcctaaagtctcacacctccagctggtggataggaaaagagaatggagagagcacacctcattcctaactactttagtccagaggtgaaacacatcacattcccttgacggtgtctagtcaaatggctaggaaatgtacccacccatcaataaccctacactggaaagcacaaatatttggtggatagctaaccaaccatgtcgttcattcaacaattacttgtaaagcacctaaaatatacaaagttccttgttagctgttgggaataaaattgtaagttaaatagaagtggttgcagccccatggagctagcttacggttttgggggtaaatatacattaatcaagtaatcatgaaaacatatgatcccaactgtgcaatgaaggaaaagtacaaggatagaataaagtttataacaagctagatctagcctgaatacctgaggaaggaacatatgggctgatatctgaaattggaggaggagtatctagaaaaagttggagagaaaagcattccaggcagaaggaagagcatgtgccaaggccctgacataagtaggaaagaatgcctgtgtggttgaagcctgacagtgagaaggaaaatgggggtgtcagggaggtgggggagtgttgtggaatgaggctagagaagtaggcagagaccatcaggggtctacaagctatggtagggattttagacttcttcctagttctgttgattcttattatgtgtttactatacccttctagtcacacattggtttatgaaggttgtttatatacatatattcatacagaccttcactgttcttgcccttcctctcagttctccactattatcaacctcctagagtatcctttccttaaggccagttgatttcaatgaaagttgtcttcctccccttggctccatttcagcaggcataaccaacactgtgcagtgccccaggcacactgtgggttctcatatctcagtgcatttagcacacacttgctgctccttgtacctagaagacccacatcctgtcatacttcaggcttcattgcattcatccttcacaactcagcttccccactcaattctactgtaagtccttcactggctttcctcaaactcctggctcagtcagattgctatccactccaaacccaccgtactccacattaaatgcaccactagcatagcacttattaaattgtgtagttggtttatttgaactgacttcccctactgtgttccaagtttttaaggaaagggatagttttcattttcatttccatattaccggtgtcttgccattattttatacatagtaggcactcaaaatatagcattaattgaatgaaaaaaatatttctcaaacttctttcacaagacactaatgtcactatgagttttacctaaattcagatacataaacaagttattttcttggccaaataagttggggaagattgtatattatgccctaatcttaacaattattgacaatgtagtagatgtatagaatacaaaatttaaggaagcagctgctgtcagcttaatgcaagcggcaaccctgcacttgtaataccctaagaatgactgcttccttaaattttgtgcccttggtggctggtttacctcctcctagtaataggcattgcacattgtcatttcaaaggctctcagagtttctgcaatagcaaaaacggtttaacttctatcatctcagggtaatccaaatgtatttgaggatctggccctttttaatttttcattaatacctattaacctcccatagtactgatgctctttgaaatgaacttttaaaatgctttgccactatatggattaatacatttcgatgtgtgctttttcaaaaatgataacctttatgtgggagatggatttagatagaaacttgggtccatttatcaaaaactacctttgaaaatacgttgaatgttatgatagccagaagaaatttctaattaggttctaataatgttgctggcctctcaaagtagttatagatgagaccactttaaaaggagggccatttccatcagtgaatggatgggtttacacttccaggtaaagaagatctgttttatctctccaaagacaaataaatctattggtctgtccaatgatgggatgaaatgagaagaaaagttcaattacttgggaaataagcctggtgggataggtcagtggccctgcttaacactgccaaaatctcagctctctgcttgtccatcttgcaaatgtgtgtctgactccatctcggtggaaggaataggatgtcttcctggctgactcaaagaaccaagtcattttatctcccaggaaagtgatccacccaaaagtctgtctgtcataattattgtttagaggaggagaattgcttctctttgacaaacagagtttcagtggtagcaatgttaggctaacagcttagtacaaatttttggttttcttgtttcatcgaggaacttccaagctgtttttctcacactagataactaagcatcataactcagtgagggaaagattggccagaaatggctgaatctatgcagaaaggctaagtgatgtagaaaataagcttctgggaactgaaataaatcacgtcacaaataactaaacaaaatttcaggaaaaaagagaaatattgtattatcttaaacttggtttccagacatttagagggtggctggagtaagtctacataaggtcccagccagcagccaattctgcagtgaggagaacccaggatccagacccaggtcagatatgatggttgcccagtggagccaagactgagagaatcccaaggattggcaaggccctaaaatgtcctgatgattttgtgcccaaggataaactagacattcagcccaagtaatccaaagaaatgtcgtggacactagaccagagcagggaccatgacgaatagtagtgataaaacggagggtccagaaccacgtgtgtgaatctggctagatgtctgagtgtcttttcattatctgagggtggtcagtccaatctactataaacacccagaattggcttggacatagcagtagcaaaactattttgtgtggatcattcatgtatgattggttaggagtagctaatttctccatgcttttgggatctgtattgttctcttattctaaaacaaaatttcaagtcctgaacacctatggtggttgcattaggcaataattaagagaagcaagtaaatgagttagaaatacatagtaatcaagtttcctggctgtgccaagacttcctcctgtctgtcagtaaatcccacattgcccatttgtggtttgcagactgattaagctatacaaatggaatcatctgttcttttctggtcttcaagcgccttttcctcctcagggatccaacggaaggttgcctccaggcatcaaatcacagcaatcaataaaccaccatgagtagcatggctcatttagaaacagagacacaggcattttgctagaagaaacaatgattacctgtcatgggttcagagacttatggtacttattagaagtcaaagaatgtgagacttttcatggccaaatattaaactattccttggccctcaaacctgttcttactgtgattcacatgtaggtgaatggtatgttcaatgacgttaaccaaaagtttggggagtaatctttaatttcttcttcctccttttcttctccctcaactccaacatctacatagatattgagacttatagttttttcttccttaatatctttataatctttccagtgtcacagatttacttcaaactctcattggacttctatttcccttcccacttcattcattcgctacttaacagcctgagtggtatttctaaattgctactctgatcatgtcatttctctgtttaaaatatttcacactgaattgcctgcagaacaaatatgagtccataatgaatgactctgaccaaataattctatggaatgctctagggcttagtaaatgctggggtggattgactttataaaaatagtgaaatacatagattataagatgggaacaatacacactggagactactagagagagagaaggaagagggtaagggctgaaaaactactcattaggtacaatgctcactacctggaccacagaatcattcataccccatgtaacaaagctgcacctaaaataaaagttaaaattattaaataaataaataaataaaatagcattctgtctcagctttcatataatcagtgcacagaaagttacataaaacatagcagacactcaaaaactattcattcaaagaagaataaatgagccatgcaagagaataagatttaaattctaacttcatccctttctagcttaataatctcaataaagttacctagcattcctgggcttcagtgtccttcaaaatgtggttaccaacactggtaggattaaatgagatgtacttagaggacttagccaatgacttagtggcacacagaaataatttaaacgcagtctgtattagcagcaaataggttaacatgacaaaaggtatgtacttcttaggcgtcacctatacagggtactttacaagaaaattggggagttgtgacctctgactgccaagacttggaacccacattgcacatatcacccctgtattagtcaggattctctagagggacagaactaatagactagatatatatatataaaggggagtttattaagtattaactcacccaatcacaaggtcccacaacagccatctgcaggctgaggagcaaggagagccagtccgagttccaaaactgaagaacatggagtccgatgttcgagggcaggaaggattcaacatgggagaaagatgtaggctggaatgctaggccagtctctcttttcatgttttcctgtctgctttatatttgctggcagctgattagatggtgcccacccagactaagggtgggtctgcctttcccagcccactgactcaaatgttaatctcctttagcaacactctcacagatacacccaggattaatactttgtatccttcagcccaatcaagttgacactcagtattaaccatcacaacccctaatcagtcaatcaaaaggcatttactcaggtctcatcatgcaactggaattcatgtttttcaataaggttaggaaatctttcctccatatcaaatgaggattttgcaattttaaaagtttagtttgatgttccagtggaaagatcaacatctgttggagttagagctatattaagtagaaattaatgattttagagtttgccttctaaaatccctctctgttagaattgtctttagtgagccattatcatctagaatggatccagtgacatagaacagaaatctggaagtgtggggctctattaataagaagtatgatgcaattactcttccaaagttgatcaagtgtgatcccactgatagatggaatgacaccagtaaagaaaaggtaaatccttagatttctaaatcattttaagaataggacaagaatttaaggaatattaagtccagttctttctccaggtaagacagcctttagcccctggaaaatgaagaatcctatcttaaaaaggtaatggccattctctgaccaatgcttcttcaactgaggactatgcagaacaattgtttttgtaaatcttgattggatttgaaaggaaaatcttttcagaatgctgagactctttcttcaaaatgcctgtctcctcatggtgtctctccaatgtgagatgtggacagatttctgttttgtttcacagcacatatggcagatactgtgtctcagcctcttgagctctggaactagcacagcctttctgtcttataaccctggggttgtaaggttatgaagttacaaattatgtacctaacctaaattctaaataaaatatggatttctatatcacttcctactgatactctaaaacatttgaagagatttattacttacttagcatttgtgaaaagtgctccaagattcttgcataaaaaatccatcacattttgcttttgttcactcactcattcatccaagcaacacttattgagtccctattaggtgcccactttaatttttcattttttccaagtataattaatgtctatttttaccactagactgtaagatttatatagagattagtccatctatcttcccatctttattgctgtttaaattgcacttatgtatcttttttgctgttcttctatatactgcacatatatcatttcccaacacagtgtgggtactcaataaagacttgataatgagtgaaaataaaccatcaaataagattgcttcctgctatgaaacagatccaactcatccaaagtaggtctagaaaatacagacaggtggagatataagtcatagagacagagagtcctaaacccaaaaaaattgtaaaggagagatacttataatttcagaactttttatagcagtgcttcatcagatgttaaaagtagtatgcatcatacctcaacagccaactggtctattctgccttattgagtatctatgcattaactaggaattgtgttcatatttgcaattcacataataaagtttcctgaatccaaccacccatcagtccccaaataaaataactggttctcacatagatattacacctgtaaatttggtagaagagagtggtacaggttgaaccagtgcagaatgactttgataatgaagacagagttctcattgaaagcctggggcataaatcactgtcaaagcctgtctctttactctgtccacacaaccatgggagtttcagtcctcctaaggagtagtgaggtgtgaagttaaaaggtttggacaagcatttgggagcctctgaggcttatctgagctaaccaagcctcccaaagccataaatctccaatgaaagcttccaagagtgacatatttcttgtggaatgtcccctagcttggctgcaatccagaagagcagggatgtgtgaactgacaagataaagccaacatacccattgcccttccatctcctcctgggcatttcttagtctggcttttgtgagtgtagtaacattttaggactgtatttgcctacttacagcaatactgcattgaattatcttaaggaaacaggatggcccttgattgttgttttctctctatggatgggttttctgttgttgttgttgctgttgaattgaagaacacagtgggagccaggacataattgctaccatagtcacaaaccacagactcctgggtattctgtgtagtgtttctgaatatgtccagagaccacatgcatccaaattagcaagttgcttgcttcaaaggcagattcttgtaacccactccagacaagttaatcagaatctctggaggtaagtcctggaaatctgaaatttaacaactcttcttaggtgtactaaattcttagacataaaaactttttattgtggttcctccaatgcaaattagtgttttaacagatgaggactgagacccagaggaatagaatgatctgcccaacgtctcacagctggtacactgggacccaaatctgtgccttcccaggtctgtccttgattctctacaacatcccccgcatctcctagggcattcaccaaagcatagcacgagtcctatagagaagtgctttgagatacttgcaccatctctggggcatgtaatctgagggaagaagagagccttaactggacagattacattccaattctgtgcaggctatcatgtaaacaagagagtagagaaagtatctctacaccatccggttgtcccttcaggctcccagcaaattttcctgctctacctgtccttaccttatgcttagaagagggtctggtattagtaatttgttcttctgtataaataagataaagaaatgttatacttgcatatgttgtttaccaggtactaccaggtttttatttgctcttggaagccttccctgactatctgcagtgaacactcccagacaacccttggtgcaacctccatttttgccacctccactgcatcactattatttatttgcacgtccatcacctgcactatatcatcagcatcttgagggatgaaactgtcttgcatttttatattctctttgccagctcaattcctagtctattgtagttgataaaaaaacgtgtgtgtgtatatgtgtgcttgtgcatataataaatccttgcaatgacctggcaaatagaacaaaaagtaattcccaccatagagatgaatgaactgggtagccaaaggcaaagtgatatgaggatgattacctagttgtccagtgaaacagaggagatttgaattgaattctgaatgaccccgagaatgctgctgtttccaccataccagagcactaccaagttccctttcaccatcaaagtgttctctctcctgaaggtagtgacttctttaaccaattctctgattttggaaaaggaagttttgccccattaatgaaaatgtagtgcattaattaaaatgcagaatgtaaactgagaactgatttagaagaaaaagaaaaagtagcaaagtccacagccagagagtctagaatcagatagagagcaagatataaggagcacatagaggtaaatggtgcgacaaagtctgtaaaagaagtttatgctttgagatgccccttctactaaataatatggtctgagtttcaggattagaggaagccttattagtctggacacatgctgctaataaggaaggtggtataaccccaagacagcacagagcactccacacagatgttatgccctagatgctccacgtttcctctcgaggcggggtcagagtgggagaataggctaggcagggaaaatgagtggcggatgactgtgcacaaactcatttatgaggcctgtagctggtggtatgcccaatatttataatagatcttaaaacaaagactggtggaaagacctgcattttacttggtcttgctccatcaagcaaagcagacttctgattcccctccccttttaaagttaacccttcaatcatttccttgcaagtttcaaacaggtctttggacacattcatctacaggtcacttggctacttcatggcatggatcatgccatacccttctcctatgtatcatctcctgtttgtactacccttgaggctaataatagctaagggcccttcttcactgtcattgtattagaagctcacatgaagcattaacccataaaccagggagagtcatgttacatggatcccaaaaattccagcaccatttcctctctttgctgttgccttggtgcatggataccttagtgtgtgaatatcaatgccatctatggctgctggacatcccagatgctggtacttctaccatcctttcaccctcagcccccaagaaacaacccaactgcatagagatatagatcaaccctcaggatgcccaaaactggattcctggggctcttgtttcatcaaaatcacttcctctgttctcttgacccatgtcattatattccttgctgtttggggaaaagacactctttaaagctggctttgtatttatagccacctccctagaactgagacatgagtctgtggagacagagcctggggacaaacctgagtaattgtcaccagactttacttagctgtgcctcacccctccagcatccagttcttttttcctggacccatcttgccagcatactttcacctcaccttaggttgagtccatcagaagatactcaggcccttgtacagacagatttccactagtcctgcccaccagtctagacaagggatgaacatgactgaggccccagcccagatcaccacttctggaattacatctatgtaattttgatttaagaaattctctccttcatttaggtcctatttatggccatcttatagggtctaccctctggtaggaagagttctatttcattctatttggcattctgcactgccaaattcagaagtccaaatcagagtgttcatgttgtaaatgaaaggttttcttttaactcccatcctagcagctaggttgatgtcagagggttgttgtcaagtctacagtgagaaaaagacaataaaattaagggacaataatcaagggaacttgacccctcttcccatgtacacaactggccaaaatctacccatattcaagtcacaacctccaaacaagctgagatatatatttggtattattttcatagatgtttacagtcctgtacaaagcattaaactaattttgtgtcaaatgttgtcactgaatttttaaagaaatacatcattccaaatactaaattatggatcaaattctcataaatccctaataattggtggacctaattatgattatatgtatttgcctaagagctccataaaatgataaagtattgcttgacttcctaaaagctacagttagaagactggtctagactgagtggtatgagaacacagtttgctttttacctttctgacccaattggcctttaattttgatggtctgcatttaaaattcattttgtgagtaaacccagcgaggctcctcctccatggaccactttgggtaatttttttttggcgggggggtggggggacaattttaaagagtgtctattatcaaagagaaattttaaaacatgtatatttataccatgtggttggacatcgtagaattagctggtaaaaaacaaaagaaggaaaaaggaaaaagtgccattggaaaggtacatagcagaagtaaactatgaagctatgtggtatagtgaaaagggcccaggatgtgaagaaataaagccagattcacggcctaattcaattcttgctagctctgtgttttggaataaatcaccttcagttgctttattgtatttcgggatcatcatctataaaaaatggaacctcccatctcatggacctctggtgaggatcaccacgagacaataaacaagtgacttttaattgtcaaagggatataatgatacctaacaaaagaaaacaaagggagtattgttcatcaggtattgatagttaacaattttattgctttaatataattatcccaggctttggaacaaagattgaaaaagagataaagatgcaataccacataactggagaattttagacaggatctcagagagcattcattccaattctcatttccagacacatattttatagagtaggaaactgaagtatggaggagttgagaagcttgcccaaggtctcacagcattatcctgagagcttgaaatagaactcaggtctcctgctgtccagctcccagcaacctctacaatccctaaagctgtttctagaatcccatctcttcgatcctgtgcctacaacccatgtcaacaaccattaaagcatattattcagttcaattgcctcctttaataattaaccagtttattacaataccttcccttccccttgcagtgcagagacagggccaaacactcagagaattgtcatagactcaactcagggagaaaggcctcttttgtttgctcatcaaacatttatctgagttcttacttgtgccccaaaactgtgctaccttgataaaaatctcagtgatcagaagtccttcaagtggtggatatactcacaagccagtgattaccatgtaattagcaatatgttaaagcaaatataaatggattacatagaagcttagaacatggtatgactaaggagccaggagaaatttgacagagatttctactttacctggaaaaatgataagttgtgacataaaaaaataaaaattttaaagccaagagaaaaagaacatatttcctttaactgtgagaattgtgcactgatcagcagcagttacgttatgtgatgatcacagtttggacagctggtttctgcccaccaggaactgaatcagattcagatcatttgaactctgatgtcaaagtcagtcatattttcaacaccctggatattctttttttaattattattatactttaagttccgggttacatgtgcagaacgtgcagttttgttacataggtatacacatgctatggtggtttgctgcacccatcaacccatcatctacattaggtatttctcctaatgttatccctctcctagcatccccccaccccacaacaggccctgatgtgtgatgttcccctccctgtgtccatgtgtcttcattgttcaactcctacttatgagtgagaacctgcagtgtttggttttctgatcttggatattctataacagcagtagttggttaacccctctgttcttagtttcttcatctgttcagtagggatgataataataatgtctcactgagaggattactgtgaagattaaatgagtcagagcatgacaaatgcttacaacaacacctgggacaaagtgagtgttcaataaatgttggcattttagtatgagaggaccaattgagtgtcactgaaaactcgtttcagaatgttactacatgaaaaccagggaagaggtgaagaaagttatatcagtcagagttcctcccaagaaacagaacaatgaggatgtgcatatattaagacatttattgcaaggaattggctattgttgggggctggctaggcaagtccaaaatctgtatatcaggccatcaggaagggcagactggaaattttagggcaggagctaaagatcctgtccacaggcagaatttatccttcagaaaagcctcagtgctgcttttaaggcttttcaattaattgtatcaggcccatccagattattgaaaaaaatttgctttacttaatttttttttttttttttttttttttttttttgagacggagtctcgctctgtcgcccaggctggagtgcagtggcgggatctcggctcactgcaagctccgcctcccgggttcacgccattctcctgcctcagcctcccaagtagctgggactacaggcgcccgccactacgcccggctaattttttgtatttttagtagagacggggtttcaccgttttagccgggatggtctcgatctcctgacctcgtgatccgcccgcctcggcctcccaaagtgctgggattacaggcgtgagccaccgcgcccggccgctttacttaatttttaacagcttttttgaaatataattggtgtgtaaagaattgcacatacttgatgtgcacaatttgatgacttttgacatacgcagacacctgtgataccatcacaagctgattgacatatccaacacctccaaaagtttccttgcatcaatttacttatttatttgtttgtttgtttgtttgttagaacacttaaaatgagatctactcacttaacaaattgtgaagtgcacaatactatactgttcactgtaagcactatgttgtatattacctctctagaacttattcatctaacatgactaaaactttatacttattaaacaactccccagttcgccaccttccagcccttggcaacctctattgtattctctgcttctatcagtttgactattgtacatgcttcatttaagtggaatcatgcagtatttgtccttctatgactggtttagttcacttaacataatgttctccacgctcacccctgatatggtttggatattcatcccttccaaatctcatgttgaaacgtgattcccaatgttggagatggggcttggtgggaggtgtttgggtcataggggtggagtcttcctgaatagcttggtgcccttcttgctgtaatgagtgagttattgctttgagttcacacaagagctggttgttaaagagtctggctcctcctccctcactctctcatgctcctactctcaccgtgttacatgctggctccccttcaccttgcaccatgattgcaagcttcctgaggccctcaccagaagcagatggcagcaccatgctttctgtatagcttgcagaaccatgagacaacctaaacctcttttctttgtaaattacccaggctcaagtataatgatgtaagaacacactaacacagtccctgttgtcacaaatggcagtatttccttcttttttaaggctgaataatatttcattgtatgtatatgcaccacattttctttatccattcattcatcaatgaatatttaagttattaccatacctcagctattgtgaacaatgctgcaatgaacctgagagtgcagacatcctgttcaagatgctgatttcacttcttttgtatttccaccccagtgtgggattgctgaatcatatggtaattctattttaaattttttgaagaacctccatattgttttccatagctgctccaccattttatattcccaacaacaatgtacgaaggttccaatttctccacatcctcaccaatacttgttatcttttgtgtgtgtacattttaaaaaataatagccaccttagcaggtgtaaggtggtatctcactggagtttgatttgcatttttctgataattaatgatgccaagcaccttcgtatacacctgttggccatttgtatgccttctataagaaatgcctatccaagtcttatgtcaatttttttaattgagttttttgtttgttttgctattaagttaagttgtaggagtttcttgtttatttagacaattaaacctttatgagatacatggtttagaaatattttatgccattccataggttgcccgttaattctgttgattatttcctttctgtgccgaagctttttagtttgatgtagtcctacctatctatttttgcttttattacctgtgcttttaccattatatccaataaataattgccaagaccaatgtcaagactttatccttatgcattctttcttctaggagctttatagtttcaagttttatgtttcagtctttaatccattttgagctgatttttgtgtgtgatataaggtataggtctaatttcattttttatgtgaatatccagttttcccaacacaatttgttgaagagctattatttccccattgtgtattattgacacccttctcaaagttcagttgaatatatatgaatagttttggttttggcctctctattctgttctattggtctatttgcctatctttatgccaataaacaatattttaattattgtagctttgtaatgtattttaaaatcaggaaatgtgatgccaccagatttattcttctttctcaagatcattttggctattctgggttgacaaaatttaatacaatttcatgataaaatcactcaacaaactaggtatagaagaaatgtaccttaatataataaagaccatctatgacaagctcacagctaacatcatactcaatagtaaaaaaattaaaagcttcttctctaagatcaggaagaagacaagtatgcccactctcatcatttccatttaacatagtcctggaaggccgggcaggcgtggtggctcacgcctgtaatcccagcactttaggagtccgaggcaggcagattacgaggtcaagagattgagaccatcctggccaacatggtgaaaccccatctctactaaaaaaaaataataataataattagctgggcatggtggtgtgcgcctgtagtcccagctacttgggaggctgaggcaggagaatcgcttgaacccaggaggcagaggttgcagtgagccgagatcatgccactgcactccagcctggcaaaagagcaggactccatcaaaaacaaaacaaacaaacaaacaaacaaaccatagtcctggaaattctagccagagcaattagggaagataaaataaaaggcaaacaaatcagaaagaagaagtaaagttatctctgtttacaaatgatataatcctatatgtacaaaaccctaacggcttcacgaaaataaactattagatctaataaagtaattcaggataaaataaagttgcaggatacaaaatcaatatataagaattagtaacctttctatatatttacaatgaaccatctgaaaaggaaattaagaaaatacttccttttacaatagcatcaagaacagtaaaatacttagggatagacttaaccaaagagttgaaaggcttctacactgaaaactacaaaatactgatgaaagaaatcaaagaatacacaaataaatggaaagacctttcatgttcatgaattgaaagacttagtgttcaaatgtctgtactacagaagtaatctatagatttgaagttatctccattaaaatctcaaaggcattttttacagaaatggaaaaagcaatcctaaaattcatatggaaccacaaaaccttctttactttaaagtaaactgattataaaatgtttaaccacatatataaaatagatgattgttgtttgattgaataactgggaactgctagccagatagccttgttgacacatgaagctgaccatcacaaaaagctagtgtacaataagttggcatagcacatttcttttaatgggttcaaggcaatcataaaacaagagtaggagggagtaacccgatccctcagacccacttatccatgcattctacagacagagctgaagaccccagggacaatgcacagactacttggctttgcatccttttgtgtggaaacagtgagcaggttcttcctctgtactgtttggtgtgctcactaaaccttagaggattctagtagtttacagtttcaatcaaagaatggggattttacacagagcagactcatgagaccttgattctaagttcctgcttctattaagaggtagcatggcataacaacaacagtaacaaatatatatacatatatatgtgtgtgtatatacacacacatatatatgtatatcagctatgacattagacacctgggttcagatccacttttgtcacttaccaggtgtctagtcaagtcacattccctctccaagcctgtaaattgcacctgtaaatggcagttaacctgtaaatagtaataatattgtcgtgtcatggttattgtaaagaattaaagaccataaacacaaatggcctgggtttataaaagatgctcagttaagacaagctatgatgcttaacttcctttatttcaaggattacctagtgttagttgtgtagtttcaggaaagttccttcatctttctgtgcctcagtttcctcatctgtaaaataagcatacaataagttgttctgtggactaagggagttaatatgtatgaagtgctctgaacaatgtctggcacatagtacgcactatatactttttaactattataatttgtgtttgtgtggtagtgatgaaatcaaggaggtacgaaaaccagattttagtccactctgtactgggtgaactggcagaagtcacttatctgtcatcaattttcttttctgtaaaaggagggggttaattagactatctgtcaagcttatgcatttttaaagatattatacctaaactgctctgtgagatgtaagaacctgagaaggttttctggcttgtgatagttttgaggtgctatgctctcacagatgtgtcaaggccttcttattgattcacaccaaggactctgcctctgtctcagtttttctgcagggtggttgatctgtttacttttcaccaagatgcgttcctctgtcagctgcatcagagctgtcataagccagcttcatgccagggagagaaggaaagacagtgtttttattggtctgtttcactgtgtctttcttcctttgggatcccttctcagaaaggtcaaaataaaattctgcaactgccctgatgaggaatgctagctgattgaagaaagagacccctgtaagcagcactgcctgctgctgagaggcccctgatggagttctgccaagcctgactcatcctccagctcagggaggcctgctggtcactccctttctgccccagccagagagcacattgcaaacatcttaaagacttgaggttggcagcttaagggggaacagtaattcaccaaagcatgatggaaaatctaatggagggcaatgaaggggtgaatgggatgtgtgccctgtcccctaaagaagggaactcctgctctttcccatttcagggtagtgttaaaaaaaagttgctcccacttcttttcttctatttgcttctgcctcctttgcctttttatttgctccttccaaaggtaaaagactaagtatctgatgtcagatgcaggcattcagtgagctgtacttactatcaggcaaagttatgagcctcaaatacaagggcccagaaaccactcttcttcctctttctatgtctaagcccagcaagatttcttctgctcctttctccaggtaaggagtgtgtgaatgccagggtcaataaggaggggctggcacaaagagagaaaaatatctgattgtaacagcagatcaattcagtgttctacaatgtgatgatcacagtgcacatcctgagtgattttccaaattactgaatcatttacttgttccactgttcattgaaaaatgaggtagaacttcatcctaccttgaattaaagggcttcccatcactcctgtcaaagctacattgcattgcatagcatttcaagcagaatgagctaagcctttcattgacttcattttgtatcctttgtgactagaactaatcttagcatttctgaattagaagaaagtttaaaaacatcccaccaaattttccataactgtctgcttgactttactacattttttgcatgtggtcctgcagtttctgcttgaacatttccagcaataaaacactttttaacaaacagattcctttgtttggtacaggtttattggaaaatacttcctttgttatttctttgtaacctcttaaaattctgtttttcctacttttggaatcagaaaaaaataaattgtaatgcctattcctacgatagtactttaagtacttggatggttcttagactaagttatgctgcagtaatctcagtggctgaaaataacaaaggtttatttcctacccacacataggtcatctgagagttctgtactaccctcacttagggactcaggttggcagaacagccatggtatttccgtggagctccactgctccacagtatttctgtagagttccacccctagatttacctgtcaagctgtctctccacagtcctgctccccattcagttcttggtcattgcagtgggccatctcatgctgctctctggtctgctttgtccccacaacatggacacagcccctctcctttattctccaagtcaccatcagcataatgatgttatgggtagcagatttgctggagtcttggggttaatggaagaagggcaaattgggagaggggaatggaagggtgacgtatataaataatctcaccttgaaaattagacatcatagtttccaaaattccttgcctgtctctcccctcctcccaccccaaacttgggtccatcttcagccctctgaggaaacccaccctaatttcttctcaattctcatgtcttggtcccacctctgtgtctctagttgttatcaaagagaaaattcaacttgaccattacctttttcagcagagaaatgtagctccttttgtcttaatctcttccattcttatttattctaatgaattctccttcctaaccaaagggcttcttaatatttcttaggcaaaataattatctgccaaatcctccatatttaaagagatagcagaagctgagaaattagtttttcttgatgtcttaaaaaggtcattgcaaatgtttttcattcctaccgaccccattttagagaaactttcaaagactgtaagtgtgagggttaatattaggggtcaacctgattggattgaaggatgcctaggcagctggaaaagtcttgtttctgggtatgtctctgagggtattgccagaggagactgccatttgagtcagtggactgagagaggaagactcaccctcaacatgggtgggcactatccaatcggctgctagcacggctagaacaaagcaggtggaagaaggtgttataaccttgcttgcctgccgagtcttctgatttccttctttttcctaagccagatgcttccttccactctttctgcccttggacatcagaatccagattctttggcctttggactctaggacttgcatcagtggcttcctgggggctctcagaccttcagccacagactgaagcctgcactgtgagtttcccgggttttgaggcttttagacttgaactgagccactactggcttcccagcttgcagatggcctaacacgatgggactttgccttgtaattgtgcgagccaattctccccaataaacatcctttcatatatacatatatcctattagttctgtccctctggagaaccgtgactaatacagtaagcatggatcataaacggtgaatttggaagtactgagggagtcagatcatgaaagaccttggaagacctgctagcctatatacattttgattttaagcagggaattaacataattagtgggttataagggggataggagtacaagtgagacaaggagacaagctgggagactgttgtagtaatgcagatgagaaggagcagtaggaatagacagaagtgctggagtcaagccatagttaggagacagaatggagaggacctgatgtgggagggtgagtggaaagaggaatatcaggaatgatgcccagttttctgtttgtagtaactgaatgagtgttgatgcaattcactgtgacagaaaataaatgagtaggaataaatttagggggaaacaatgtttcattttagacagatcatattatagatctatgaggcatcctgcaggatctgggaacagattaccaagtcagatttttcaggcaagaccggccagtgggatctgcgccctgaagaagaactaagctgcctcttagatccccaatattccaaggaaaacctctgagcaaaaggtcccctttgctgccttgatcttatttgaggtctgagcttctttcctgcaaatctttggcttaagatgtagcaatgatatctaaagtgctgaagactccaatccagtctccaccctgggagtacgtggagacctcctcttcacttagatgtgtgaccaagcacagggattgctgctgattcagtctagtcactctaaaaagtatcactcgagagctgaatatttagcccttttgttagaagtgaatggttgcatcttgtgtgtgatgggtgcataatatttaccagtgtggtaaatatctggtattgtctgtgcactattttccaaccatttttcacataggtacgtttaaagattttttgccttcctaataatttttgttgtcattgctattttgccttcagaaaaaaaaatagaaaaagaaaaatgtgattaatatggccccattcaaatcatgaagcaggagctgccattgtgaaagctatatagatggactcaggcacctaatgccaatgtaaaccagggaggctacctgctatgcctaaaagagtactggaattggaagcagggcacctgccttcaagtcccaggttttcattcactagaaggtccctttggcaagtcacttatctcccttgggtcttactggccttatctgaaaaatgggcagatcattgtagtcactgctgcatcacagggccatttgcagattacaaaaagtccaagtaaagggctatagaaaccagaattacatcccatatgctccaatcttagactcccaggctttggttccagaccaaacatctttcatctactctttctcctaaagttaacattgccttcagctgctgtggctacattcttaattttttaagaaagatcattgttttctcttacagtgcatagtatgggactgggactccaatggcaagcatgacttcattggagaattcacctcgacattcaaggagatgagaggagcaatggaagggaaacaggtacatggtcaaccacttttggttttgcctccagtcggtatgatgcatccttagaacacagctaccaatgaaacagcaagaggcaaaacatcaatgtatgattaagtgtgataagaagggagcatggtaggatgtgagtatctagattctagaactagcccaacccaaagcaattgtgtgtgcttggacaagacactgaccccaaacgttacagtttctccattagtaaaacagaaaggttagatgagagtatttctaacttcctttacctgtgtagccctgaaaagtgacttaatctctccatgcctcattttgctcatctaaaaatataagagtgataattgtacctacctcatagaattttgtgaagattaaatgagacaatcctaggtgatagcagagcgcctagcacatagctagcatttccaaaatatctgctattaacagtagtattccttctaggtctatatttccatgatttggtgacattaataatactttcatgccttggagaaattatttgaatcctccaaattttcatataggtaccaggttttcttctagttccatcattttactcttacacatttgatgccaagacctgtacacaagcactaccacataccactaagacacactgtcccacacagaaacccaaaccccttctgtgtttccctcagatacacacactttcatatcatataatatctagacagacagacagacagacagacagacagacagacagacagacagatagagatagaaagtcatctgggcccaaatcatgcaacttctccttttacctgtttattgttcacctgcccaatttccagctgaaatacctctttgcctggcagatttctctatctgctggagcctgttttatccatgcccaaaagcaagatagaagtgtggaaggagatgtaacaggaggtagccctcaacaaataactaatggaagttgggatataaataccccagctcccttgcccttcagttggcaaaactctgaggtgtatgctctatacagtttcccagagttctccagcaggccctagttatccacagtggtaactgacttgataatgcaccctttctgggatgcctcttctatctaatttctcactcctctattcatgcttcctggtatcacctcccagatggcctacttgcacttatattcttgcctcaaatttgcttcttggggaactcaacccaagacacctgccgttcttactctggagttcactgtcctcatggagcagaaaggagtgaaagcagagggctcagtgcttttgagaaagtctttttctttagagataatactctgtgcctgttctgatcagaagtgctaattagagatgcctcaactcatttttcagctctctcatatgtaaggtcaggatacagtcagactggatggaaatgaactaacatttttttagagtcagaaacttaatctgaatgataccatttgttgaacacatacctttggtctggaaactcaatggaaacaatggcagctttccacttagttcctgcaaaacctgctgtaaatgctctgttaggtactcagcattacaagaaacttgtcaaacacccagagaccatcacccacaagccaggatgcagagtttcagagccacagttaaaaccaacactaaattataagcaaagtcattcccaagataacaaggaatatagctagagaatattgctctattgaatatgcagaactagtcctatttagctgctaaatcaatgatagcattcataccacctgctagagttctaaaaagttttataaagttttgccttatccacttctatgaatagaaatagtccaagcagtaaatatgggaaatatttcatcttattaattaaatattaaaagtaagaatgtaacacatatcataaatgaaatataccaaaacctaatgctttcaaacagagagaaatcgtttaagttccactgaggaaatggaccatatgctaatgtgcttttctgaatcactgagctaccagaaaaactttagtttaactacccagccactgttttggtgtagttatacagtgggaaatattgtcttatttattgtttctacaatatttatcgagtagcacctagtaaattccaagcactgtgacaggctctaaatgcaccatgactaacaatgctgacatggtccctgcccttctgaagcttacagattggtgggagtcaggatagaatgtaaacacaaatttaaaaagttaaaatgcaactacaatttgtgacaaatgctattacaaaactaaaccagtttcattataaaagtgtgcatatagaaaagataatctgacatttaagttgaggccccttaatgattaaaaagaagccaatatgtaatgagtgagagaaacgcatttgaagtaaaaggaatagtagtgcaaagtacagaggcagggctgagcttggtgtgattgaggacctggaaaaagaccagtgtatctgaagcagagagtgaaagaaccattcataggatgtggtcagatatagaggcagaggccaggaaaagcagattcttctaaatgtgataagagcatgtgcaagctgtgctttcctatacattagccactagctacatgtggctatttaaatttaaattaattaaaataaaattaaataacaagttaagttcctcagtcatgctagccacatttcaaatactcaatagtctcatgtggctggtggctactatatttgatagtgcagattcagaatattccaattattgagaaaattctactggacagtgctgcaaagtgttctagctagagaatgacatgattggttttaattttttaaaatattacttttgctactgtgtagataattaaagagagacaagggagatctgttaggaggctaccactatagataagaggtgataatgacttgggttaaggaactagtcatagagatagataaattggagagacttaagacatattttggagatatgagctacaaggtttgttgaaggcttggatatagggagtaagggaaggaggaaatggttgactcaaggatagattattaaattgtgccatttcctgaggtaaggaagaattgtggtagcgaggtccagtttatgaggaagttttcaaaatttggtttcaaaaactggtactcagaggagaggtttacccgtaaatatattttaggagccatcaactaagagaggacatttaaaatcaagagaatggatgagtacacctagggagaggggactgaagagaaggtacaggaggctcgaaccctgaggaatctcagtatgtagcatcagagaaaaaaagaggagagaacatctttcaactttccttttcctgtgggagttatgattctataggtacagggtaaattcttaattaaccttgattaattcttgaataacatttataagtatccttagtttggggtggccaaaggggatacttgcaagaataggagagctactccaagaccttctagaagaaggcattgtggttaatagtgcaggctttggaatgagactgatgtgggtgtgaatcccaggtctaccagttactacctgtatgacctgggaaagttctttctcttctctgagcctcatcttccatctgtcaaagtgggctgtggggagagttaaatgggattgggaaagtaaagtgcatagcccatagttatatgccaacttcatcccaagacagatgcaaactatttagatctggtccatcaggaccccctacccacctcacaagtacaaggaccccaagtatctacgggtttgattcaacttccttggagccctctcctgactaagccaacccatacttgctcatcttagcctgagaaggaagtgagtagacttttcatggatgatcactataatttttaatagaattcaaaatctttaactcaatatatcctgcttgatagaagaaattgagattaatagaaatcattgagaatgacaaaaaatggcacagctaattttagtgtcttttctttccaactgtttggtaaatccctaaaccacctgttttactgaaatattagaggaagctttggggcaaaagacaatatcagttttgataggtttgggaggaacttgggctcttttgtccagaaatactaaatctactttgagatggactataattcttgtttatcaagttctacccacttggagagtaaatgagaagaaaatctgagggaggaaagaaagacaacattcattatggacagattaggagattaggcctttaaatgacaaaaacaaggctaggggtctgattttagattctgctttgaatgttttcttctttctttctttcacccaagaattccatattttgaaggagtcatagaggactcttcactggtataagatctccctcttccaaatcctatgtagttgcccagtcctgctggcaccttccagtgatgagaaactacagtatcagttatctgttgctgagtgaaaaaattagcccagaacttcctggctgaaaacaacaatcactatgtactcaacattcgctaggttggcagtattggctgaattcttctctgcttcacatagtgctccacgtggtgccaacagaactcactcgtgcatttgtgcctcagcagccaggatggccaggatatttctccaggtatacttttatcctcctggagaccattgtaggctttttaatatggccctgaaaacttcccagaagcaagagaggagccagccccaatacacaggcgcttttcaagcctctgcttatatcacatttcctaatgtcccattggccaaaatgagtcatgtgactaaatgcctcatcattgtgggagggagctacacaaatgcatggacactgagaggaatagattatgggaggccactgctatatcagcctatccatttgcacctgcctcagaaactacttcattttcagacacttctaattctcaggtagtgaaattttgtctcttgagtagaaatccagagattcagctttcataggttggtgggcaggaacattcaacaactcttggatatttgattcacaattggttttgtcccattaaatcttctgtaggctggagacctattccccttagttcccagctgactccttaattcccagccactcctgtagctctgatcttatccttcaaaaaggcccctttggagatctactgtgtcacttttgggacataagccaatccattattttagttctccatgaagttctatgttaatttattattgtccctagtaaatttctctagccagcattcactattcctaaccttttgagtcaattctcaggcagtaagccttagtacttggtcatcactcaactgtgttcctgcagatttcttcttccctgtactgctttatttgaccatattaatagtaagcattgacatgtgccaggccctgttctaaatttattacaaggattaatcagtcttcacaataatcctatgagatagagtataattataagctccattttgcagagaagacattcaagacatagagcaatcaagtaacttgccaaaagtcacataagcagggaagcggagttgctggggttcaaacctagaagtctgacagtgagtatcactctcaaccactccccctattgctcctctagatgcaagagttaccacctagagactatttgtcagccctccagttcagtttgtcctcagcagcacctaggagcttggccttattgaaagactcagctttttcctgaacagattctcatgctatgacccttctttcaggtgcagtgggagtgcatcaatcccaagtacaaagccaagaagaagaattacaagaactcaggcactgtgattctgaatctgtgcaaggtatgtacacaaccctctcttccaggagtatgaagctagggctatctgagaggaagagttcaggtggtgtggtcagaggaaaagagtatcaaaaagatgtgatcttttaaaataaaaattaaaaagtcatgtattaaagaacataaaatgagaaatgtaagcatgggtggtcatggagctgtggcagcgcagtgtcactgtcctctccccagggacagtcctgccccaaagacaggagagttccgctgataggttaggatcatctctgcccagagcagtgctagagggagatctccaaatggggaagccaacatttctagaacacctactatgtgcccttcacggtgtccagtggttgttttgtttggtttggtttggttttggttttgtttgtttgctttgttttgggacagagttttgctctgtcacccaggctggagtgcagtggtgcgatatcggctcactgcaacctctgccacccaggttcaagtgattcttctgcctcagcctcccaactagctgggactacaggtgcccgccaccacgcccagctaattttttctatttttagtagagatggggtttcaccatgttagccaggatggtcttgatctcctgacctcatgatccgcctgcctcagcctcccaaagtgctgggattacaggcatgacccaccgtgcccagcctgtccagtgttttatatgtggtaccttattcatactgaaagcgtaccataaaaacaagacaacaggcaaagattaaagggcttacgaattccttccagaggggctacaactttgcagagaatcacatgtgctaataattaaacttcttaactcaaatctgggagtgatgctgacactagttgagtacttactatgcaaaaataactataataaactctgtttaattcttaccacaaccctgagatgtctactttcaattgaggttatgtacctagctcagagtcacacaagtagtaaatttaagagctgagattttaacccacgtgtctctgactcctccatacaggactcaattgctatccagatgattgttgtgtgtgcatgttgtgtgtgtgtgtgcgtgtgtgtgtgtatacaggcatacatatatgtgtatatgtatatgtatatgtatatgtatatgtatatgtatatgtatatgtatatgtatatgtatatgtatagaggccaatgtcagggatattttgggttctattccaaaccaatgcaataaagcaagtcatacacattctttcatttcccagtgcatataaaagttatgtttacactatactgtagtctattaagtatacaatagcattatgtctaaaaatgtacgtactttaatttaaaaataccttattgctaaaaaatgcaacagtcatatgagccttgagtaagtcataatctttttgctggtggaggaccttatctggatattgatggttgctgactgatcatggtggtaattgctgaaagttggggtggctgaggtaacttttaaaaataagacaacaatgaagtttctcattaattgactcctcctttaatgaaagatttctctgtagcatgtgatgctgtctgatagcattttgcccatggcagaacttctttcaaaaatggagttaatcctctcacaccctgcctctgctttatcaactaaatttagggaatattctaaattatttcttgtcatttcaacagtgttcacagcatcttcaccaggagcagattcaagaaaccactttctttgtttatccatgagaattaactcctcatccattcaagttttatcagttgtggcaattcagccacatcttcaggctccacttataattccggttcccttgctatttctaccacatctccagtttgtcccaccagtgaagttttgaactcctcaaggtcatcctagagggttaaaatctacttcttccaaactcctattagtgttgatatttcaacctcctcccatgactcatgaatgttcttaatggcatctagaatcatgaatcttttccagaaagttttcaatttacttttctgagatctatcagaaaaactaccgtaatgatagttataaccttatgaaatgtatttcttaaataagaagacttgaaagttgaaattacccctagattcatggggtgcagaataggatattgtgttagcagtcatgaaaacaacgataaaaccccttgcacatctccatcagagcttttgggtgactaggtctattgtcaatgaactgtaacattttgaaaggaatctttttttctgagtagactcaaaatattcagtaaatcatgctgtaaacagatgtgatgccatccaggctttgctcttccatttgtagagcatgggcagagtagatatagcataattgttaagagtgctagaatttttgaaatggtaaatgaacattggcttccacttaaagtcaccagctgcaatggcccctaataagaaagtaagcctgccctttgaagatttgaagccaggcagtgacttcttctctctagccaggaaagtcctgatggcatcttcttcttccttgttctacaatgaaaatccgttgtttagtgtagtaaccttcctcaaatgattttagctggatcttctggataaattgtggcagcttttccatcagcatttgctgctttaccttacacttttatgttacagagacagtttctttccttaaacctcatgaaccaacctcctctgctagcttcaaacttttcttctgcatcttcctcacctctctcagccttcatagaattgaagtgagttagggctttgctctagattaggttttagcttaagggaatgttgtatctggtttgatcttttatctaaaccactaaaacttccttcacataagcagtaagcctatttcacttccttatcatttgtatattcactgttttaatttcaagaacttttactttgcattcacaacttggctgtttggtgcaagaggcctaacttttggcctacctcagctactgacatgccttcctcactaagtttaatcatttctagcttttaattttaagtaagagatgcatgactcttcctttcacttgaacacttagaggccattgtagggttattaactggcctcatttcaatagagtagtgtctcaggggatagggagacccaaggagagggagagacatgaaggaatggccagttggtggagcagtgagaacacacacaacacttatcaattaagttcaccatcttatgtgggcttggttcatagcaccccaaaataattacaacagtaacatcaaagataactgatcacagatcaccataatagatacaataataatgaaaaagttggaaatattacaattaccaaaatgtgacagacacaaagcgagcacatactgttgggaaaatggcaccaatagtattgctcaatgcaatgttgtcagaaaccttcaatctgtaaaaaatataaagctcaataaagtgaggtacaataaaagaagatacacctatacatatatgtgtgtgtgtgtatacacacacccagatggtccccaatttacgatgactcaacttataattttttgaacttatgaagggcttattagcatgtaaccccactgtaagtccaggagcagttgtatatacatgtatttatgtatatatacagtcatgctctgcataataacattttgtcaatgatggaccaccgatatgacagtactcccataagattataatggaggtgaaaaattcctatcacctagtgactcatagccattgtaatgcaattactttattttttaaacaaattcagtgtagcttaagtgtttataaggtctacagcagtgtatagtaatagtctaggccttcacattcactcacctctcactcactgactcactcagagcaacttctagtcctgcaggctccattcatggtaacttctctatacaggtgtgccatttattatattttataccatatttttactgtgcctttttatgtttagatatgtttagatacacaaagacttacagttgtgttacagttgcttacaatattcagtacaataacatgatgtacaggcttgtggcctaggaacaataggctataccacatagcctaggtgtatagtgggatataccacctaggtttgtgtaagtatactctatgatgttcacgcaatgataaaatcacctaacagtgtatttctcagaatgtatttccatcattaaatgacacatgattgtatatatgtatacgtgtgtgtatgtgtgtgtttatgtgtgtgtatacatacatagatatatgtttcctaacatattagaaggaacctaatatgtatatatacaggaccatatccttacataacaagatagtgaaggaaaagagtaattggtctgctttgggtcatatccctaccctttacaccaattgctgggactaggggataatgtcttatgactggccattgtattaatctttttttttcaatattttttgatgctttgacaactttgggccttatgaacctaagagggactactctcccagtgttagctaattcctatagacagcaaacaacctgccttttagcatgcctttgatatacaaaccaatcattttttagttcaaacccccaatcacctcccttaccaaactctcacacaccaagccaatgttctcccaccttatatgcccctagggtcaggtctcacataactagaaaccactcacatggttttgatagatttcaaaacctgctgaaatcgttcaaactatccaatcctaggcctgcttagctgcttaccctgccttgcccactcctgcctatgaaaaaaaaacacacagtaaatggtttgcccatgctttcccttcattgcttttgcttcctgacctatcctggtgcttccccatgtgaccttcctttgtggcataacatgcctcctatcctttgaagaactgtgagcaataaactcttcttacagatacagacatctgtctccatgtcaggcatcttatcataactgtacaaatcaaatcctgggtacattctaaacagttatgtgactatccttgtgctcaaagaagcaggagaaaagatctagattcaatggttatctttctccttaaggtgactgtgtacacacaattttttttttcttccatgagttgctcttagagttcagtgctcagaagcactgttattttgctcactttcaagttcttatttctttgatatgcagacacagtagcacagtgtcccaactatcaggcaaagcattaccatcaggacaccaaaagtaagcactatttagaggccaagtgaacatcaattctaagaaaagtatgccaatagatgtgtgccacctggaggtggtatctagagagaccaacactgattttttgggtctctctaagaagcttcctgagcattagatggaatctgagaagtgacagtcaaaaattacagttactggctgtccaggtagaaggatccagactgtaagtactgtatgtgtttttctaatcactgtagtcctagaatctagtgcatagtgagtattcaataaataattgttgaataaacgaatacatgaatatcaccaagagccaagccaagcagcaaaatcacaaagaaatgtaaattaagaccagaaatccctaaggtacttgagaacacatgatggcagttggcataacgcaacaaccatactgacttccagagtagaggtcaaaaggacagagtatgtaacccagacttgcatcatttgagtctcaactctaccatttattagcattgtgatcttgaccttaatttcctcatctataaacagggtacaataataatagttgtgccaccttcataggattgttctgagaattaaatgaggtaaaagatgttaagtacctgtcattcagtaatgcccaataaatgttagtcattgttgttcatggcaggggaagcatttaactaactggaaattgtcagtaaattaccttctcagccaatggtattttaaaactgcctatctaaattacctgcatattaagaatgtcaccaggactgggacttagacacagggaggcaagactgaagtcaagtgtgagacatcattgatttcaaaacagtagtgacacttgaaaatatagttttagtctcacttcagaggcataagctgattaaaatttgcataaaccataatagaggggagcaatggatggatattggcagcattcataggcccatctgtattaatattgctttccttctctcctttaacagaacaaacttaactgacccatcttttttcaatgatgtctgtctgccctttcctctggtttagcagcttatcagtcaccaacctttaggcctccaatatatcaggaaatagactgtgctgttattaacccagtttcctctcccctcctatgcagattcacaagatgcattctttcttggactacatcatgggtggctgccaaatccagtttacagtaagttgttttcatgttgattccttgattcttattcaggaatcaagagatgaggggtggcactgggtttgggggataaagagacaaaagcttattaaaaccttcaggcagctttgttcaagtctcattgttgaagcgtatggtatcgtgtttttgaaatgtgttcacacttctgttttctttaataagtatagttttcagcatcatatcaggaaatttatgccactcaacctcaggtggtctaggaaatcctcctaacgcttcccatttcttcagtaactatgtgaggcatgaagcagagtagcctgtcagattccatcacctggtgagaaaaattgaaaggaagtaagccaagcaagtaagttccactgagccaaggcagatgccatggttgtgttcatgtgactagaccacagcaccaatgtcatacccagtagtcgggaccaagagtaagccatacaaacagttcattaggcaatgaaaagatgaattccaaagattggagaaccaggccgaggtcaaggttgagaagtagagtgggtgtctagactcagtgaatggatcaaggatcatcccctgtatgtaatttgtgtgcccttgggatttacacacccctgatgtatatttgactgggtaggctgagtctttttaaagtgcctaggtaggtcaaggttgtaagtccatctgcactggaacaactgactttcactgacttaatattcaaaattctcctaggtttggtcagatgtgacttccagaaaaagaatccccagatggcaaaagacagatgtgctagaaccctttggaaagcaatgtggacgtaaacaagagagatgtaacttgtacagcatttatttctcatcttacagaaatgtactaacgaagctcagccctgttcagctccctgactggctcagtcatttgaaaaaaggaaataaaatgggtttaaatttttagtcaagctttgggcccaagagagtagacgggacctatatattcctggaaccaaggaagatggtgctcaaaggactaaaaggagtctcaaaggatgagataaatggtcatttactaaactagcttctccttagctagggaagtatcctctgccctaatctcagggaggtatacctatgtccttcctaaacttggggtattgtgcatttatttctgaacgcttacaggagcaaattttagagtttggtctcctctttaaagtctaagattctctaatgcacagccagcaagccttcctacattcacactgtcacatacagaaggtagcaagcatgttcgctgaggatacacatctaactctagctgtcctgtgggctcattgctgctctgagcatacccatatggaagtatggaagcaagcaatgtcataaaggagagctactggaaatagtttcccaagatcttaggcaaaaacgtgatttcaggaaactatttatagcttttcaagggaaagctctattgatttcagtctggtttagattttgtagatcccatgctcttgaacaactctgtattcaaccttcaggggcttgctctgcccttcaaattgtgctgcaaagaatcagccccaacaaaaattaggtgctgaaccccaacctaaagtgttcccagctccacatcctgactttcagatatccctgtgccctgcattgttctcccctcctttctcagtctgctgaccttcccccactgagagtaccacttcagtgtttgtcaccaacaacaccccagttgcagctccccatgccctccagtgtcaactgatagacctgtgggaggtgtgagtgaggagagcagtctggagcaaggaatgagaagaggagaatgtacagatgaatgctgaggagaagggggcagccaacaatagttcctccccacagcccttcctcctgtagggtttcaggttggggactcagaagagaattgctaggtattctattcccagtgttctactaaaggaaacataccagtcacttctatgtcattttcttccaaaatgaagtcagctttctcattctaaatgttttattgctcaagtggtgcaacttaatttaaattataagctgtaatgcaaatcgttaagaaaaagtatcgtgtcttatttaatttggtctgtaagtgtttattatctgcctggttattttactgaaaccatctggcaacatgaaaaggaagtggcagagagatgagaagtgaagagaggaaggtttcctggcatggaggtgggcagaggagagagagaaaagggatgtttcattgcagtaattatacctcagaggctttcagaggcaaaaacccccattggcacattatgtgacccttggctcctgagcaaccagggagctttagccaacacaaactttttgtctccctggagaaaggccttcaagcaccagaggtgacataaagttctggatgttctccatttcctcccctagagccactttccatccttctccactctcccttctgtgccccaggaagcaagcctccttggatgcaccacccaagctctccagctcttagcttttggttggatttgaccaacgagaggcagccatcagagatcaaagaataggaggcgagagaacttgaaatatttatttctctagctgcctgcctgctaggctgtggttgggcagcgaccttcttcctgacagaaggtcacagttcctgtcaggtgccctgtcctgaagatactcctcttactgaattctagtaactgctccctcccactctttctggtcagtttccattaaccttttccacatgtttgtgaattgtccctttattaaacttcctcaatcaccttttgagtggactttttgtttcctgtagtggctctgaccaatacaaaatataagcaggggctaggagaaagcctttgtatcttccatagatgctggtgcttctggttcaatcttaagagtgttaaagatgggggcatctttctcctcagctgctaagctgctcaaaatacttttgctgaattgtaataattgaaccctaaaccttcaaagggaggttagatttagaaaaaagaacaaattggataaataaacatgatattggggttttgctttaaaaagcatcccccataaacttaagtatttatgtaccactatattctaattataaatactaaaaccttaattaggaaaatgaataaacaggatgtatttaggggagtattggggaagcagtttggggtcagaacttgaagggctttgaattttgaggtaatttggtggataatgcatgttccaaaggatattgacgagggccttgaagcaacaggcacatgctttcgacaagtaaacctgggtgtttgatggtggtgatgggggaacgagagatgaagcaagcagagatggaagcccactgccacaggcctggtaccaggtaaaaagaagctaaacaagggtggcagcagcaggagaggtactgtggaaagagaagcactaagcctctgcctagaatacaatgagaagactgaaagcaatcaaagcttttgtgcctgactgacagagcatagtggacctggtcagggaaatacgcgaggcaacagcagctgtaggcaagatgatgaatttggctttggacacgtcagaggtactttcaggtatcccagtggagatggtacttataaatatggacctaggtttcaggggagagtcaggagctacatgtatgtggctttggatgagatgtcccaagagaaaaatatagaaggaaaaggggcctgatgacaaggaattgtagaggacctctatctggcagcagaggaaagaggggcaaagagttaagagaagaaatgccagaggagaagaaggcccaaggggaggcagtaactcagatgcccaggaggaaaaagctaaggttaagatcaagggcaacaatcttgcatgctaaagagaagtcagagggtgaagaacaacatgatgagtaggtaggtgtatatcatcttcaaaagagcaacttcagcataacgagataggtgagacccaggagttagagtgtaaacagaaggtaaagaagtgaacacagcaggtgtaagtattcattcaagaagttaacagtgaagggaaggcaagaggtacaaggaggatggcaatttaaagattaaaagagaagagattttaagctagaatcagactataagcagaggtaacagcccagtggaaggaaagagataaatgatgctaaaaagagccctagacagtcaatgattcttattcttttttggtcacctgaacacttgagaatttgatacatgatctatagcctcttactgggaagtgcacacatccagttttgcatgcaattttgggaggtcaagggcactcctgaagacagtccttgtacctcacatgaatccttaagtcataagaactctagagcaactagtattgcagtctttgaggaggtgggtggaggtgaaacagaccacagggtgagagattgggtttggcacatggtagagcagctaaaaataaaaccagatactagaatttcacacacaaaatacaaagttatagataacacaaaatagacagatgccgtacagtatttgaaaagaaaaaatgggggagatatacctaatgctagatgacacgttagtgggtgcagcgcaccagcatggcacatgtatacatatgtaactaacctgcacaatgtgcacatgtaccctaaaacttagagtataataaaaaattttaaaaaaataaataaataaataaataaataaaaagagaaaatggtagaaaaatcaaaggtttttttgaaggttattgctttttcatatgctcaaaaatgttcattgtaacacagatttttacacaggcactctgtcagcaacctaaatgtctaacaataaggtaatggctacatgaattacagtattcctttaaatactatgatatttattatcatagtatttagttatttagtattgactatgataaagcctatttaaattataattctaaggtttagataataacatgaggtcatgtttatgacatagtgttacaaaaacgtaaagcagagttactctatgattacaactatatatatataaaatacctagagaggaaagaaaaataaaatatgacttaccagcctagtggcatggcgagtgatatttttttcttattaattttaaacggacatttcttttgtgtcatttttaaaaattgaagataatattgctttctcttacctctgactatagtttatattttagtaatataataagctgctgaatgcaacttctcccagactgaccttcaaacctaaaaatttagatcactcattaaaggttctctcaggaaatctttttctttctttctttctctctttctttctttcttcctttcttctttttttttttgtttttttttgttttttttgttttttgaaacagggtctcactctgtttcccggagtgcagtgcagtagcacactggaagctcactgtaaccttaaactcctgagctcaagtgatgctcttgcctcagcctcctgagtagctgggactacaaccatatgctaccacactggctactttttaaaacaaatttttgtagagacagggtccagctgtgttgcccaagctggtctcaaactcctggcctcaagttatactttcatctcagcctcccaaagcactgggattataagtgtgagccaccgcacccagtctcaggaaatcttttctaaccctaaaacatttagggcatcctatgtccacactgtggcccagtttacatttttaaatctttattttacatcccagattgaacactgatctactctggtgtagaccttcgagtctgcttactgcttagtgagccctgcttactgaattcctatgcaaagccagggtacaatgggttaaagaggcaaatgctttgccatttccagaaaatgaaccaagtaagtttaggtgactttccctactttcctatttaactgccctcttagaaagttttctgaaaatagaaaagaataaaaatgtaacattatttaagaaatggtccagaccaaacagtatgttcacctacaaggttcattgtataggtccaaattgtacacagctatttaaaaagaaaagaaagaaagctccccaagaatgtggtcccaaaggtagactgcaggtacaactaaccagaggttgttacacagcagcttcccttagaaaacgtcgagaaggttcacaaatgacctgtttggcagatgaagggaagggatctgaggagtggggttgtttcatgtaagaatctaaaaatgcccaaagaaagatgctcatcatttgcaaccagccttttcccaggaacagctccacacactggggacttggtgtcatggagggggcattttgcattcttactttacaaggtttgcaaagctgctccacagctctgcttaataatgagcagtggcttcctgggcagaaggaaaaagcactgggcacctgttcttgtgctgcctgcagagaagattggagcacataccagaaccacaggtttccataaatgcttcctatcaggaaatgaaaacgtggtggctctgcgagctcaccggtattcagaaaaccaggcatcagtagccacctccacacactgacatttttcagtcattttcttgcttttatttctcaacttaatcccatctttcactgcctccctgttgctttctaaaataaacctaacctttcactctgctctctttctactaatgctaactttaaagagcacagagaattcttggtggaagaccaccccctgaagatagatattttatctccagcttcataaatgaggttttaggaaccactactttccagaaaataaaaatgaaaatattttagctgactcttacttaagactgtccattgctgtctagtcacatgataaaatttttttattaaaccatgagaactataaaatgggctatatggtaagaatcataagcctatttcctttttcatcagttaatttttaagttcataccctcccctaggtcgatatgagaatctcctgagatgaagtggcctctctcgttgtcatagacgtaggggccattgccatgggaaaagtggaaaccctagaggcctgactgaaaagaaataatagtaaaatttccaccaggcatgtttgaatgtttaaatagtagcaccaagaacaggcagcccaatactaaccttctagcattagcctgtaccttgtttcattatcttcaaaatatattattctcttctgtcccctcaaaacctggccattccctttccctaactgacatccaactctgcattcaagtggtcacaaaatcctattcattttctatccttactttcttcaatcactctttccttctcaccatcatctttgccccaccctagttaagcataagaaaattattccaagcctgacaatgaagagttgataggaatgaaaatgacatagtagggtcagtattggaggtaaagcaagagacgtacctggggtgcaaaatttaaggagactctcactctgcggattttgcaagtatagggtctgctgagagtgagtgcctccttgggttttacaaactaggcacttctttttgcctcaccccatctccagctctgatatgtttttttctattattttaaaatatattgttgccacaatctatgtatgcttgtccagacattacacacacttatctagatataacatattcatccaggtgatatactctggctcagatgctgccactaggtgcctgcatgctaggagaattttgccaatgcctaggaatgtttcttgagcagccatttttctttatggatttttttcctctggcctatataacccgattgcattgtctagttttatatcaagacaccagcatgtttttgtcatcacagaacacccttaacacttcaggagtttcagtcagacaaccagcacatgggacagattgttagctttagtatcaagaggcagaagcatgatgccttcagaggtaaggaggtggtgacccatgatggaaggcatcatgaatagaagtgaggtgggccacaaggtgtttgttattaataataaagtagcaacacctgccaatgattcactttttagataaattaaagcagaatcaaggtaatctccataacaacatcttcacgctctctagaattccctggagtactaacatgctttcctcagtggaagagaaaggggtggctttacatctggccttcccagcattacttttaccttttaaacactatgtacacctgtgcaaggtgccattatcccttaaacatgtcccattaggagtaaaaggctgagaatggtgtctgtgagttgagcttggtaaacccaggagggccccaaagatatgattttctcaaacattgtctctcaaacatctctggagtgctcctctcagaaattttcctggaattatctgcatgagtttggatctctatcttgttgaggcctcattggtggatcctgaggtgctcttcacctccttcttgttcagaaaatgcatgtaggttcctctctcccaccagcttttcatcgtagtccttgattaaaagggcctcacctatggtcttacttttttttttttttcctggtgggttggctctcaccttcaggataaacctgtcccagaagacactggactttattggtctccctaggttacctccactcatcctcagtaacaatcatctcactattgtgtgtgcaaacatacatacacacacatttcagttttccttttcttaagttttacacccattttggtcacgaagagtttattccaggcaattcttccccaaattgccatggttgcctcctagcaagtctccctacctccaggccaaatctcctgcattttatattggaataattatacccatgagaagtcctggtgttttggtcatagacatacatgttctcctggatgtatgatggcgtaatggaaaaaggtagaaaggaaccatatagacttggatttaaacccaactccaagccctgttaccctatgtcacatgaaaatggagtaatatcatgcatataaatgaagtaatatcatgccctctgtgtcacacacagttagcacagtgcctgacacagagattatttctctcttctttcctttgttatccaaagtaagggaatctaaggttcagggaagaactgcaatttttcttcagataacctttttttttttttttttacatactcttagtactagcatttatcagtaggcatcccctgattttaagaaatctgggtattctgaaaacagagtttgaatcctaagtttatttttgacgtagttctttggagaggcaaggaagaaaaagaaaaacataacacagatgaacacgtaatttcatgaaagaaaagaaaaaagcctataaatgaattaatgttagcctattgcttttctttcctagtcactttgatttgattgcagggtacaatatcagatgtgactaacatttttttccccatcaacttataccttaagaaacacaaacacacacgtggcatgtgttctctaccctttcagaaataatgttgcaccttcctagaaccaatggtgcattccagttatttgttgtaatgaaatttaccaaatataacacaaataacatttcccattatgattcccaagatcatatgaaaaaatagagcctttcgggcatagtaagccaatgaatgtattctactctaccccagaaggaaatggaattatgcaacataaacatttctttcttcccgtatgacttttattttaaccttcttccctcgaagcttaagtggcatttttaaagagatttttgctgggttaacttttatttagatggtggtgatgttggaaattagaagaagtgtttcttctcattttaacaccctcggcttaagcattttttgttctttcttttgttattaagaagtgttcagtgactcaacgtttacttacatgattatgatactgggggtcagaagaaatttgagaagttgaagcataaatgactagttggtggcaagacaggtttcccttctccacttcccactcacaatgcgataacattcaggcatcccctttgttgtaggcaggagttcttacatgaacgagaaccaaaatattgaatgccttacatggagctgctccttccagaaaatttgttataaccactctaacacatctctctgcatctggccactcatggaaacatgacaatggctttggtatgaagactgtatctttaacacagaatttggttttaagggatcttacctatgccgcgtagatggaattgttctgcccagggagtgtagaagtcttttcttagtgaactgtgaaattggagggcagatattctatccttactcttgctgcctggtgagatggatcaacagcatctgggctttctgatctatgtcaatctcaagttcctattaaacagagagaagagagtgcactggtgggaagggagactgaagactgcagaaatggcctcaaccaaattaataactagtttttcaagcaaattagtttattctctttctttattggcagggtatgtaatgtgctactgtttttgacccgaggccaggtctctctcatgactgatcacaattcttaggagatgcatccactttaaatttaccttttcttgtatttttctcttttaggtagctatagatttcactgcctcaaacggggaccccaggaacagctgttccttgcactacatccacccttaccaacccaatgagtatctgaaagctttggtagctgtgggggagatttgccaagactatgacaggtaagaggcttcaggacatttggagccttatcatctctcatgtgggttcagacggtctttggctgatcctgggcagaaagtggaaattaagtctagtagctccttatgtagtgacttcaaaagtttcattccctctgtactagaaaaactaagtttgtaccttgctcacgctggtcaccaaacaaatcctttctcagccttcttctctcaattgacttgcaagacgattggatagcaattttggtttccattttgtgaagtcttagcctgtgccttgctactcaaaattgcttatgcactagcagcattcttaacctactgaatttgaatctgcatttaacaagatccccagatgatttgtgtatactttagagtcgtagaagcacaggtctattagacattattacatctgatcctcacattaacccttatatagtatgtattccttaaaagaagggaatactgtacaggaggttaagtaatttgtacactatcacgtagccagaggcaggacttgagcccaggtctacccactccacagcttagcctgtaatcactatgcttcactgacctcaaaagctattggtaacttcagcagagggtgtggcacatgtatgtagccaggtgcatgtgtatgtttgcatgtatgtatatagaaaacatgattttaagatcaaatcaatgttctatttattcttacttgatgataaatattggcctttcctaccaagaaaattccctgtaaggagtatcttgcataaattacgttaaactgaatgtattctgcctttccagtagttttagaatgaagtaaaggaatttaggtgcatgcataaggaaagctttttgaaatgaaaccaatgtaaatataaatatgtgtaaatctcagttaactccctggtgtgattgtaaaccaaggctagttagtaatgagcagcaacaaattgacctttcaaaccaggaaaataaagaaagtaactccatcctttaggtttcagaggaattttgtaagacagcatgatttctgttctttctagtgtcataattggtgataatcatactaaaaacctgttatcctccacaccatgggaactgacacattttaaggactagaatgtacagggaaactaataggacagggcaatgggaaaggtgcagtcaatctcctgcctgcctgtgtctctggattcagcttggtcatcaccagtaactcaaatgtagtacaaagccagttggggaatgaatgagcaggtccagtaaaatcaaagagctttaaacactcaggcccttgctgataattcctctcctgtacatccaggaaaaaagtcaatagttattttaaattatctttttggaaaaacacctcttatacttaatcttgaggtattgactatgaagataacttgaatttcaacactgatttcttcaagccccaatgcaggcagtgggtgagggggttcctagagaggtttatatcatatgaagatttccaccagggagagaaaagactggccaattgcatccactacattggaaacttctccaaacgtccccaagacacaaaaacaagaattttcttccttctttataccacacacacagatgcatacacacattagtaatctagtaaaataatgtgtgcacatattgagagacaagaagggggagagtatcttcaggattctcaagttttcaatcttgaaatgcttgcaaaagataaagtaggtaaatgcacttaacacaaatgtcaaacagtagatgcttaattaaaaagttaactctgaatctgcggggaagaaagcagtctcataataaattacaaacagaagactgatgggttttctagaaatgaagatagtaagcctcagagccctcattatagttctgcagcagatttagtggatgatctggaagaagctgctgaacgtctccatttcctgatcgcctcacatgcaaaatgcagagactatagtcagagtggcatgtatatcttgtaaagcttttatccctttgtgagccagacaaagtctggggagcattttttgttccctcaaaaatgcagattcaatataaaaataagatataagatatgaaaccttaagagttacatgaagaatcatcataagtgattgttttaaaatttttaatagagtaagattgaccccaactgaccaagaaaatcaaatttctacagctcagtggagcaattcttttttccatataaagaaagcagctcaacattaaaatgggcaaatacttaaggaagaagaaggaggattgaaaaactccaatgctccttttaaaaagctccctagaagaatgtgtattgcaagctgctcacttgaaaactgacaaggttccgctgtttctcttttgtgtgggtggatagacaatagacaggcagagtcaggaaatttcaagtcggggctctggaattaatttattctcacatcaaagtcagtgtggttggggctcaaaatgaaacacttgaataaaaactgacagaaggcattgttccccctcctgcagtgacacagaggtttctaatccccatgagccttagaaattcctcccagcttctggcagccaagagttttctttttgccttgtacagtcattgctaccaggtcattatgaggtgatccatgaggtagaacagcttgagagatgcataaaactcttttcaggatggccttgaaggaaagcttcccacagacagcttgtcctcaagcctgcctgcctgttctgtccttcagcctctgaaagagatggtgctgctcatttcctctgcctttgaccacccaccccagcacaactacttgtacacacacacaaaaacacacacgcatgtatgtgcgcacacacacacacacacacaggcccacacaagctcaagttgtagcacttctccagctcctgtatcctggtctccctagtctgctcaaagccaaggtgacatcttttccttggggccagtagggatatgggtctctgaaaacctgaaatgttctctaataaaaagcatggtctgtctgctatcaagacagtacagaaactgaatgtgtacatttcctggaaatatggattgccattttatggaagtgtctatcacagaatgagacagatatcagaaaccaaggcagcatttctccatgatgtactagttatggtatgagaagacaaagttagaactgaaacccaatctgacaggtattttcaagtgtagagcagttgcttagtgatgagaagacagttcaaatcacgtgctaccttgtccactctacaccagtcagtggtcctcagccttggctgtacattgaagccattcgaaaagccttaaaatgtgacgatacctgcaccccaccccagaatctctgatttaactctctggtgtgcatcctggaaattagaattctttatcctgctaggtatccagggttgagacccagtgttaaatcatgagagatggctcagatgcaatggctaaggtcctatgcagcatctatttaagccccaaacacctcacgggaagctgtaaagacagaaaaattaatgaagcacaatttttccccaagtagcccacaatctcactgggcagaaacacgtgtaaataaattacagcccagcatggccggggaagtgttgccctgtgtcgggatgggaactgtataaaagagggaagggctaactctgtcctttgtgggaagaggggtggtcaaggagggagtcctggggatgataatttctgggctgatcagaatttggccttcagctttgttgttattagaatgtggatggatttgttctcctttttctgaatcattagaccagacaagccttctatgaggacagaatcaacagggatgatagagagagcatggggaactggtgacagttagacccgggctcaaaccccagctctgctacctctgttgtcataagatttgcattctatgggccttggttttcttcattgtaaattgaagatgtatcgcttcccttgcagagcagttataaggattagatataaagcagctggctaacacaggttctacctttataaatactcaataaatgtcagaggtgattatctttaataccctagatttatgtttcaaaaatgatctgaacacaaagggagacagaactattgtgtcagttctaaagttcactttggaccaatgatctttaaaatgtttttgctcatgtacttttaaaaaaaatattaaaatgtatagctgtcacattttttcactgaaatctgacatttttcatcatgagtttatatagtgataaagaatgaaaattctaatgtgttgtaagtttggacattttataataaaactcttacataactcttgtgactgagtcaagtggaatctaaatgccgtaactatttgatatccaccatcatccattttgtaaaaaatgagcaagctcttcaatgtgagttgagaattgtaattgtttcttccttttcatcgacttatatttccattctcttccctccaaaattttatcctaatgtatcttaataaaattggtttgaaattctgttataatcactgtatatttctgtaataaaattataaatttaaaactttttagtttctaaaaatttctaagatgaaaagattcaaagtattttttaaaatctgagcttttattacaattattactagtgcataattgatcaaaagaacataaatgtactagaaatttcagtgtaatttttgcctataaaaacctatcagaaatcagctcttactgaaacagataatggggtgtttttccaatttgtttatagacctgtggatgagtgctacctattactagaatgggagagtcaagcatcaattctaactcagttttttgctcttatcatcaatgtaaatactaagaaaacctgttcttataaataagtgtatggaaataaataacttgtctagcagtattactcaattctttcaagtttaagttatataccaaaaaaaattacataatggccaatcatcaaaacgttttcttcaatgaactaccagctgacatcagcacctgccaaaatttatttaaagcaaaacttggcaactacctgacttgcaaaaggattttttcccctagtgaatcattcatgtttagaattattcttcttgtatatgatgctacagagttttcacactctggagcaatggactatgatggttaagattcagaataggtaaaagagaaggatacgtgaaagggaaggtatgaatggagaacaggtctctccatcacaggcattcccagaatatcaatttcagcaaaaaacacatatggatgtagaggaactgaatactgatttccctttaaaaaaaaaagccatgtcctcatatccccagaaatgctttgcatttccaggtaccccagttttaagacctctgcttcagagaacagtttttattaaatgtctaggtgccctgagatgccatattgctgtgagcttcatttccttatggatacagtaatttttctttacgtttattaatgttttgatttatctcaaaatcttcaacagaaaggagaaaatggtgattaaaaataaatcttccatctggaggtcatttgacaatagtcattccctaagaaggtcaggacagcttactcattaccattgaagcacgtagggtttttttttattgtattttatactattttattctggttataagaaagattgcctttacccatgtggtaatatacccctcaattttccagattgtctgtctttgtcagtcattttcccagcagttgctaaatggccctttgctgggtgctgagtggatccaatcttgaattcttaaagcgttagtatacagatgctttcttttgtgttcaacttgctttcttttacttcttgcataataagactcttctctgcctagttttattttaaaacagaaataatggatgtttaaatccattgtgcttaggcttaaaactttttctttagtgtgtttattagttagaggctttctggtggctaagttcagagaatttatccctcctggctcattaattattccccttgtaggtgaggcattttccctaccttcctactcttgaaactcgattacatagcagtgcatcatgctcagcaaacattgaatccccaaaagtggcttagaaagtataaaaggaatatcattaacgctagaacaccatagggattagaaatggatggaatgttagagcttacccctcctcaactcatcaaaaaaagaaaataagggtgtggagactcccagtttctctattttgacttctgggtcatcctcgagtgtgaaggaccaggatccatcctccacccagaaaagccttacttcaggcttaactagaaagtaccctaaaatcccccgcacagatctcttctcacacctacccatgcttgttttgtttaaggaggaattgctgaggcaaagtatttcagtatgtccaaggacccagaagtatattttctcctatctatagctaatccttcataagctgttgtgagtctctatttacccacattaataccttatctaatacctgctagatgcaatgcaccacaaagcctggattgacccaacagtgaggagaagtgggagttggtgattttctggagaatttagacttcgatttcaaagaattccagcttccttgtatctcccagcccctaaccccaaatttgatacaattggctatgttttggtaaagttttgtcaaaaccatcattggctagtaatgagctcttaatcagtcaggtggtgataaaggagaatctagctttgctactttgacttttctgtcagcctggggattagtggggctcatccctttttccttatagatgtttaggacagtgagccctaacctgaattgactgaatataccaagaacagtgaaatgtaggaattgttccaaagaacaaatctcagttaatttcttaatgggagaagaaataaaaggtagatgacatgagaaggacacgtccttgccaagagccctatggcgacagccacccgacagcacaactattcgattaaagagggtcttatttgttgtctaggcagggggccagattactggaagtactagcagaaaatcacatttaatactacatataatcattaaattataatggtataacagaaaggtatgggctttggaatcacacaattctccttggtaatcaccataggccacttagcctttctgaggctctatttacctgtaaaatggaaataataagtaggtgaagcttccaggattgtgtgagaatttaataaatagatacatcatctagcagggggctggtacattgtatgcatcaataaatgttaattattctcttccccatcctgtcaactatagtacagtaaagttagagttaagatccaatatatgtgaatgcataattaagagagaaactccagtgtgcataagataactcaaaccaaaggatatgtaagtgattctctcaggttttcacaagaatcctcccttcttttcatagccacattttaataattaaaattcatggattatgtactcattaactactgagcacacattccatgacaagttctataataaatggtggggcagggggcagttgaggcagaagacagtagagatataaagattttaataccaaagacagggtctctttgagttcaaaaaacaagaaaagacatgtaaacaacttatcaccgcttgtatgtgataaggtggtgggcacaatgagtcatgtagagggaaccaagctctgtcaaattagccaaacttacaagctttccactgcttgttttttgcttttgagatagagtcttggtctattacccaggctggagtgcaatggtgcattcttagctcactgcagcctccacctccagggttcaagcaattctcttatgcctcagcctcctgagtagctgggattacaggagtgcaccaccatgcccagctaatttttgtatttttagtagagatggggtttctccatgttggccagactggtcttgaactcctggcctcaagtgatctacccacctcggcctcccaaagttctgggattacaggagtgagccactgcacctggccccattgctttttaatatccatttcgattcagtcttatctgtatttgaactctagctctaattagtggcatgatcttgggcaagtcactttacctctcaaggcatttccccacctgcagaaggggaataactatctctccttgtattttaaaagatgatacatacaaaaggttctaacacagtcaaccattacagttacctagttcatggtcacttttcaaaggaaacaaagttgaaagttgaagtggaggccattgatgaaagggtagggccattttatttcttagtatagaatctagcaaaaaaattaagggaggaagttgtagactaatgactgtaatgaacttaaggggctgtttcttgattttaattatccatgctattgctacccccatcaccacagacaatcaagaagcatgagtcagcactggcatagcaacatggcctagcaacctagtaatgtaggttaatgtttttctttctcattaaatgaataaatgaagcaacttcttgttttttcttttcttcattttggtttcagtgacaaaatgttccctgcctttgggtttggcgccaggatacctccagagtacacggtgagtgagtggagatgtgatcttcttccacttcactgtggtcaaaggataacttggctcttctttgcagcagtctcacactcctgactctgacctaactgtgtcagtagggcctacagagtcagaaattgtcttcagaatcagtgagattaactcgccagggcccgtctcttgatgaaaccctatctcctggtattttggatgggtcttctcagaggtccagatgaagagtttcattgtttagtttcttataaatgtggtcagagtctgagaaaacactcaagaagttgatctccaggggctcagaacctattcactcgtatatcccctaggaaatagaattctattggcaatgccaactgggaaagtccgtgacaatggagtctacagactttcttatcccaagtctccgagtccaagtcttgtatgggagacacagagaagttttgaagaaagaactattatgacttagagaattgggaagctgaaatgttcttctgaagacgttggaatcctatttggttttgataatgatttctcatgacagaaaaaaggcaaagattgtgtgtagataaatttgcactgtaatgaggctgagacactactgtgatattctagatgctcctgtagaacattctccacagagaactcgtgcccactaggtggacagggccttggagagacagcagggtacctctcccagcctccaccttaccagtgcctctgaggtctgagctaagtacaaacaacactgcccaatcctcaatttctcttttactggctgtgtctgagccacaggtgaggaggtagatgctgacatttgctccctcactagagccatcatataaagggctttccccttaggtatcctttttgaaagaggaaatcaatatccctgttgctcctagagtgaatagtggatggaatcgcttgtctccctgacctgttctccttctttcttgccttgtattccacactggcctttctgctgggcatagctacataattctagaagcatttattagaaatacagcttgtggagagaaagaatatagaacaagagttatcaactggtggcctatagacattattcaggccacaaatatgttatatttgacacacttttaaaaaacgaattcagcaattgcatatataaaatgtcagatttctggtttctcttgaaaacctgaaaggcctggcaacactaagattaaaagatgaccgatacaagaataagctggagctgaggagatataggccccttcaaatcgggaatgtaaacaggtgaatgcccactttcttcatagagctgctgaatagctcaatagccatcagcccaactacccagggattcttgagttttcaccacatccccaccaggtggtcttccagcctcaggttggcccaacagggctgaggacagagctatgcaccatacctttttctcactaatgacatctttttggttcccttcctggagtaactaatctttcttgctgttttctgaagtcctcttgttcacttgatcccctaactccatccttcctgtcagcaaaatcccctggttattcttgtttcaataggcatctctcacatttccccatttcgggtcccctaatttctcccattcctcagacaagcactgatgatttgagcagctcaggtgcccccaggagagtttacaaggttgccacaatttacttcttaggacaaaatctgaaagtatgcattgaaactgaaacacaagcacctctctttcttagttagcactttctcagaaacagatcttgagacaagggtttggatgcaaatagtttatttaaaaggtgagggaaaccacaatagaggttgggaagtggaagtcagcacagagtatattatcaagtcagttaccgctgttggcaactggtgcttaactctgctgaagaaccctaggagacaatatacagcacacatggaccccaagggataagggagctgggatatgtatacatcacctcctgttaattactgattactcccaagggtcacttttagcctgtcacttgggcaagcaaggcaggccctggaggccaagaaaaaacttaaggtaaacaaagcaaataagatgactgaagtcagctggcttacctggaagtgctaagagcaagggactaggataagcactgagagcatcaccgatcacctcccactaagaaaacaggtgtcttttaacacagtgacctaatttatggatacccaaaagagtcagagcttggaaatatcctttgaaatgaaattctccataaaataccaaatgattcaataaaaatgtccagatgccagaacatctatcttgttttatcaggttttcggaaagaaaaaagtaaacaatatgttatttgaccttgtgcataggttctgccaggtagaggaatttgtgttgaaatattacaaagtatattactttactatgtttccaaaagtagagtgcagtctgttttacctgtaggtatgtgaaaatcctcctgccctgtagttctgcatatcatgttaatgattcttaagtgtcaactgcttagctgaagcttttataaccatcgctatcttcagcagacagcttgggttattgagtttttttgtttttatttttgttttaatcactgggtccaaatagagctcagccaaatctaagcctccagtctgtggccagttctaactagcagctattcaaagttatctttctgaaatcttttcttggatttttttataagccttattctcccctcctgacagcatttatctgattctagaaaatattcctgtcacctcaactccacagggagcttagaattcaccctccatctcatattgattgtgtaaaggcttgaaatggttcctgctgcttaacacataatgaatataatgggcatttgtttgcaaactctaaaccccagtgccttcttactggattaaagttgtaattcttctttcttcctgttttttaaattttaatcggtgtctaggtctctcatgactttgcaatcaactttaatgaagacaacccagaatgtgcaggtaaagcacaacgtgaaagaaagccagtgtcacagtccttccctttgcagctttcccattttagttcatctctgctggtgtagcatattagttacgattgtccacagaatctctgctttctgtatcaacataaaccatgctactccacaggcaagagaaagccatgataacagagcaggaaaataagaactggaaaagacagaatgcagaagaggtggtcttgagtgtatggcaataatgttgatcccagtctgggattccttgggccataataataataataataataaatgaaacttcacctggtaggcagtgatacaatatccctctttctgttttccaaattttcatcaagtgttttttttttttttttttcacaacttcatctctgtgccgatataaggagaggggggaacatggaaatcatttcccactttcggcatatcggccaaggacatggcctcagcgagtttgaacaagcagcatcatggctttgtgccagagaaagcctgctcaaaggttctggttcatgttccattgtttccagccagaattctctgacatgatttcacaaaataatgatattgaaactatgataataattattataataaattttgttctagaatgattttttctgttttctaacagagccaagtacctatgttgctatgaagatcataagacatttttgcattagaaatgtccatatctctctcttcttgtcaaggaggaaggaggctaaatcaggattaattcagatccagtagagtgtgtaaggcatctagcagttaatggccaagaatatgatatcaataccattgagtctgaacacagtaacctccaagacccaatctccattctgccattttttccactaatgtattcttcatcctcagtttattatggattagactttcctcatccccaaccacccccattctgcaactgtaagagtggtttcccccacagcagaatgaaatataaaccctggtattcacctgttttatactcttagaattcatctgcctgatacttttcaagaggaaatcaaacttgcttatcttaggcaaaagctcaagaaccaaaaaaacataaggagcttctattcagcatcacttaacttcagaaccagactgcaaaatgacttggcatctgtctttagaatgataggctttggggcagggccaagtgggtgcaggattgccaatgaggttgggagcatgtatgtaagggcagaacagaacagaacttgctcatctaaaatacccaagagctattttgcagtgcatggtggttatggagaataatctcaggagggaattgtgtggatccctctggccaaaaacaggactaatgtgctatttcagaatagaaagggatagaaggataagctgaataggggaaggcaagcaataacacaggcacagacaacaagagaagccatttgaataaaaatcatttgtaatgagattattgctgtgggatcagaatgataacatgaaatgtacagtcaagatgtatcaagtactaggagaagctgtatagataggactgcctctcctggcagagtcccatccttttctatttcctgggctcatatggcctcaggatggaagcccccttttaaatgaggggttgtccgtgatgataaccatcacttatctgtactcagtgcccaggagatgagtatatcagccactttgctcattcatcacacacttggtgagcattacatttgctcgatactgcctcaagctctttggggaaatacaaaaaataagtaagtcatgattcctgcccgcagagtataacatctggagagatggtcatgggaactcctgactcttatagagggcacgggtagtatctactagagtcaacaagatcgtgtggaaacaagtgcaacattgaagctagcttgctagtggctaagaacacagtgcttagagccaggcagacccaagtttaaatcctgagtcttgaacacacttgctatgtgacccagggcagatcattgaacatctctaagcctctgtttcttcacctataaaatgggtataacatctatttcattatgctatgaggagcgaatgaaatcttatatataaagtaggatattagggaaaattttgtggaaatcgttgcttttgactttagcttttaaagaggagaatgatttcagtggggaaggagacagcaacactagcaatgtggtattcctttttatcttaagaacataaacatgatgttgataaggactatttgggatatttaatgctttacttttgtgtgtgtttggctataaatatatttggagtgactctggagctgttgatctttgccaatttcacctcaggaattcaaggagttgtggaagcctatcagagctgtcttcctaagctccaactctacggtcccaccaacattgcccccatcatccagaaggttgccaagtcagcgtcagaggaaactaacaccaaggaggcatcggtaaggagggggctatttgcctcctaaggggagcttactcttcctcacctggatattggccgtaagacccatctcactctaacaataaattccaacacttctccctgtgtgaatttggacaaatgacttaacctcctcctatcctcagtcttgacatctgaaacatggggataatcaaacccatctttgctgggttgtgaggctaagagatgacacatgtcaaatgtctaccacattgtctgaacacaggagaaactcaacaatggaagctactatattcactaaagtatgtcatatccacctcctgtccttgaaaagaaaaaagaaaggtttaaaaataagcttgctttttaaggtacccatactacagatggaagcaaagcaccatggaagtaaaacaatggatgattctgcctcctggtggtaaagcgcagcagcacaaaacatcacagcaaaaattggtttcatattctattgcttttcttaagaaaaatgcaaaccaagaccagagtttgagttttgcccctaatattttagaagtaaatatattaccacaataacttctgtatttattttaataacattaatacatgtctttttagctttatgattttttccagatttagtggaatattaccaatgtctgaagtttgctctgtaattttatcctgggtactgagtttttatttaaaaaaatactactcccttatcttcttacatcaattcatctaaccttcttgcactgtcttcatgttctcagccttccttcatgttagaatggatggaggaccatgctcctacctcatgtcaacatcttcttttgtgtacttgagcacatctctgaattatccaggaactttgactctgcagttatattctcgctctttctcctatcatctattgttttcttttctacttccctttgtactgaagactcattcccattaacaagtactcattcaataatatctcctgctttaagttaatatctcccccttgactctgctttgccctttagctactgtccttaactttttcccacttataatctgcactccatgcagaaaccagattgatcttttaaaaatataattagtattgcagcattcctttgttctaaattctctaatacttctcatcatacttggagtaaaatctaaattccctgatatggcttagaagacattataggatctaatctctgcctacctctctgatcttaattcttatcattttctctttcgctccctatatttcagccacactgaccttcttgctgttccacaaacacaccaaatatattcccaccttgaggccttttcacttactgttcccctgccagggtttctctcacccaaacctccatatgatccattctctgactgtgttaacatctcttctcaactctcaacccctctgaaagttccccctggctaccttatctaaaatagccaacccacccacccgcaccatgtctcagctttacttttcttcttagtacccatcatcatctgaaatattttaggtgcatctactaacctgtatattttatgtctctctactttcatatggaagctctacaataagacttgttcactagtatatccctagtacacaaaacaatgcctgcacacagtacatgcttaataaatactacttaaagaacgcatataaagccactctacttttcatatatatatataatgaaaagtactttacattttcttttgtaaaactggtgtgtatcttaaatattgcacatcttgtacgccagaaaatacagtgttcctgttttcattataatttgaagtctctcctacttaaaaagatccaaattcccaaggtccctagagagaacaacagtcactgcatgtctttggttcagtccactggcccttccatacatctcattatcatcttcagctactccgggcttgggtcattgagtgacatgagcaattcctacaagggaataggaagtttgaagcaaaattttgttttagactcataatttttccatgtccttttattaacatagttgaccacagtttcaatctgctacacaacatccatcaggtgacccatagctatccataagaaacaaatgggtctgatctgtggggcatgttctctcatctcctctgttcattacatcatgttcttgaaatcactaaccggtggtttgactgtgaaaaggactggagaccctggggagctaagtgtgtgttacttcaaataattactttagaatagtgaatatataaaactgtggatatattagcctttatgctgggcagagacactctgtaagctgagatcttgtccagcagtaatgctgaggatttaatccaagccaagtcttttccaggtgtgaaagctaagaaaatcatgactcctctctgctcatttttcctcttcttttcagaagccatgaacactattaggttttttttttttttttttttttttttttttttttttttttttttttgcgacagggtcttggtctatcacccaagctgaagtgtagtggcacaatcatggctcactacagctttgaaccttttgggctgaagcattcctctggccccagcctcccaaatagctgggaccaaaggcatgtgccaccacgcccagctaatttttatattttttgtagaggtggggtcttgctatgttgcccaggctggtctcaaactcctgggctcaaacaatcctccttctttagcctcccaacgttctggggttataggcatgagccaatgcatctggctaaccaccaacacttctcaggattatagaccaacatttccaccagtgcgtgggccctgcaaaggcttccccaaatgcatctctttctgaccacagaggtcttggagcaaatttgaaccttcatagatgcaagatttaggaataaggtttggatgtgaccattattttattttattttttaaccttttttcagcaccagaaccaattcttcaaatgataacttgcttagaaactcaacatataaaatagacttaaaaaatacactattcttgccaaatttggtctaaggagtagagtcagaaacttgtccattctctttagctcccttatcctcaagagcatccaaggcatccctaagggctccctggggcccagtttaaaaattggatgatctcatcccctctggggtaccaggactcacatggctaaaaagagaacagaactaacaaaggtctggatttcaggctgatatagaacagcatgagtttttggccatcactcactccctcagggatagctgggtctgcaatgaaaggacaggtcattaaatgggactacaagtaagaagcatccaacccacacatctccatataaattacccctatagaccaagaacataagcttttccccagaggtttctcctgttctttgaaaagtctgtggtccagagtcccttgttatctctaagggtcataaacttgaacatctttggcaagctgtgccagggagtctgttgctataggattttccccttgattttgtggaactcttccaggtaaaaaatgcccctctttatctaaacaggacctcaagtatattcaaagactataatatttcatccatgagcattttcccagtctgactttagaaggaactgttattgtttgctttattggaaatttctatcaggtttcgatcctgcagtctacagcctagtgcctttagctagatgaaacctggcaggatcagattccagaatcctgacaatctcttcagaccaggagttcttaaacttattgttccacaaacccctttagcagctgataaagttcatagatcccttctcagaagtggttttttgtgtttttttgtgtgtgtggttttttgtgttttgttttgtttgagatggagtcttgctctgttgccaggctggagtgcagtggcagctcactgcaacctctgactccctagttcaaatgattctcctgccttagcctcccgagtagctgggattacaggcacgtgccaccacgcccagccaatttttgtatttttagtagagacagggtttcaccatgttggccaagatggtcttgatctcctgacctcatgatccgcccacctaggccttccaaagtgctaggattacaggcgtgagccactgcacccagccagaagtatttttaaatgtacaacataagacccatattataaagtaaaccaattatattgaaatgcagttagcaaaatattttttaaaaggaagatggagacatcataaatacagtaataaaatgcttctgtatttacattttaaattatgagaaccagtagtttgtctaataattctgtaatttctaagttgtgttaaacataaataatacattgaaatatatgtaggtactgtaatataacaggaaaatatgtgtttttttattaataactaagccacaagtagaactaatattaatttgatttgttgattacacttatagtgaaaaaatgataaattttacttagagattagtgaaaataaaaatgtaatttaccccaagtttacagactgccttaaatcttgcagtagtccatggagacaggttaagaacccctagtttagatcagcagtcaataaactataactaaactaaactgtttttcaatggcttgcaagctgagaatggtttttagattttttaattgttgaaaaaatcaaaagtagaataatatttgtattttgtgacatatgaagattttgtgacattaaaaatcagtgtccataaataaaatattattggaacacagcctctcatattcattttaaatattgtctatggctgttttcacactacagtggcagtgttaggtagttgtgacagagaccattatggtctacaaagcctaaaatacttattaatgtcccttgacaaaaaatagtttcctgacctctgctgtagaacattacgactctaaagtttctcaatgtggtagtatgactatcaggttgttttatttcttaaggcatttatcaggtaggggagattcatccactgaactctaagatcagatcagacaggagttaggggaaggtagaggataaaggtaggagacacagaagtgtgattcactcgagggcccacctgctcatgaatcagaagtaatctctttttggatgtgccacctgccctggtcttccaggtgcactctagagagggtgacttatgattctggtatgtcctatactccttccctccatccccaaaccaccaacattgcctctttctgccgcttctctctgcacctccctaccacctccatcacttcatcctactgaaagccttctctaaactctcaagccaacttccttgtgaacatatacaactcagaaaatacagacatagaaggaaacatacaacttgaatgaatctgaaaaccaaactgggaattcagctaggactaggggtgagtggttagttaatggacatggaacagaattagcctttacattagactgtatgaaaagcattcagaacatgtggctatcttcatcacagtgtgaagttcacctacctccagcttacatttttcatttaaaacattttttcaggctcacagaaaaaaaatgaaattctttagtactaccaaactatttgcaacattaagtatatgattctcaaaatcagatgttttcaaaatgtcactcttctatccaatctttctcctttgaagtatggtaacgtggaatggcttaatctcactcttactacctataaatgttaggcatcttgcaggattatattgaaagttcttttctgtttagcctgagctgcatctgactaatctgcttctctttcctcttaccagtaaaggccatcatgatgcctctcatgttgactaaaaataatgatgacctccaatgggtcatccttctccaggccccagagcactttccaaggcttccctgtgctgctgagtacagcacctttcctccaattcccatctctgctgagtcatcttccagctttccagatggaaaggggccaggcaggctgcaggccagaagtcaggacttaaagcaggaagccatgggagcactgcaaccttctgcaagtgtgcctggagaagagctgccacctttgtggcacatggccttcagagggagagactgcaaccctgaccctcttatagcaggactttagactagtgccatccagtggaaatataacacaagttatgtatacagttttaaattcttcagtaactgtattttaaaaagtaaaaagaaacagagaaatccattttaattatatattttatttaaaccaacatagccaacatattgtcattttagcatgtactccatataaaaaaattattaatgaaataatttgcattctattttgtataataagtcttcaaaatccacatgtattttatacttacagcatgtcaatttggatgctaagttatcataaatacttgatctttgtttagattttatagttacagcttaattttaataactacctcactgacagttacaaagaaagaaaaagtagattaatctactgaagttgttccaaacatacttaaaatgtttctaataactgaattggctatccaattttaatgttaaatttaaattcattacaattaaataaaatataaaattcagttcgtcacttgctctagccacatttcaagggctgagtagtctcatggggttagtcatcattgtattggatgtcatagctttagatttttaaatatcttcaagtaaagaagatcatataaattattgggtcccacccctcatttgagaaatgaagaagctcagacacagacgagttaagggatcgtcccagggtctcacagaatgaggctttgaagcctgtcctcctaactcttggcctgctgctctttctttgtaactgtcagtgaggtagttattataattaagctataattgccatgcctacctttaagctccattcatcagaaccctaagcctttaggactatcagcacattcaaaaaatgtctgtcatcactgttgctttggtcaatgtgcagtgaggccacctgggtgtctaactggtattgtattgtccttgtctccctcacctcttcacccccccccatcatcatggggcatctgactgcagcaatacttcatcctgctgatcctgacagatggtgttatcacagacatggccgacacccgggaggccattgtccatgcctcccacctccccatgtcagtcatcatcgtgggagtagggaacgctgacttcagtgacatgcagatgctggacggtgatgatgggattctgaggtcacccaagggagagcctgttcttcgagacatcgtccagttcgtgcccttcaggaacttcaaacacgtatgcatatacacattggggcacttttcatggaagagcagaaccaaagcatgctcacctcccacatttgtccaccaatgtttatggtgatccaccattcttgaagcaacaccagctatgctctacatacccttgctgtgggagatgacctggcttagctatcccttcctgggccacgtcatctcccacaacaaggatatatagagcatgactctttggagaaaaaaattataaattgagttacagatcaggagccatgctaactattgtaggcaaaatttcactgatgcttgccctataattcatataatttaggatctctagtgcatctaggactgcctacagatgggcagcttgttccctgcctaaaggtgcctgcccaaagtaccaagcagaaactgaaatgcagcttatgttttgcttgtcaagctatgtggcctggcagaagtctgtgtttgccttggcaaagtatatttccaaaatgatagaaacctaaatcctctataaaaaatatagtaagcagcatcaaaaatttatttaactccttcaaaacaagatgataaagttagttcaaaagagtatataaggctgggtgcagtggctcacccctgtaatcccagcagtttgggaggccaaggtgggtgtatcgcctgaggtcaggagtttgagaccagcctgaccaacatggtaaaactccatctctactaaaaatacaaaaattagctgggcgtggtggcaggcgcctgtaatcccagctactcgggaggctgaggcaggagaatcacttgaatcagggaggtggaggttgcagtgagccgagatcacaccactgcactccagcctgggtgatgagagtgagagttggtttcaaaaaaagtaaataaataagacagttaaagtcagtgggaaaaaatgctgaataagtttgctaaggtagattgaaaactgattaatgaccaagagggtaaaaaaaaaaaaaaaaagtaatctttgaattgccctctctgtgggccagaaatcgcctgctatcagttttctataaattaatacctaactttacagtcttgggctcttaccagtaagaaatagtaagtcagtcaagcagcattgcattccccaagggccttgaggcagaaccattagacaatgctctagtatgacatagaaaaaatgctcagtaacaattttcccaccttcccaggttttgatacattgtgtccatggaggaaggagcattttttaaatttccacaaatccctgcacctactgagctgtaatcacccagaaggacatcttgaattcataaaagcctcccttggggctaatggtagtcctgaagacccctctagagtatcctagctgtgtctaggcacctgtgggggtaacttgggtattactggatagcctttgtgttttttgttttgtgcttcttgtgaaagccacccaagaggagagcatatgcccagcccctactttccactgaggccttgccctctgcactgctgcagatgccaacaataccatccccagggctggtgactaaacttgagctgccctggcaacagggaatcttcagaaccttcagtaccgtgaagcttatctgtggtctccttggaaaagaagagaatcctctcctttccatgctaccgagtcccctctgtcacctgagtcattaatgcagtgagatgtgtctccacatctcaaagacccctgctggaaagtatcttcattaacttccactgcagtccctccctgcatagggctcaaatcagttatttgggtcaggcaggatgccatcccctccacttcaaccttatttggtaaagcctttctcctccagtcaaaaactcattcaaatgaatccctgacattcttcatactgagtttatcagatatatccagacacatctgactcccaacttgggttcacactggactctcacctatactgtgtaaggaaattgcagatgagaggtggaaagctaaatggatcatcaaaacaatgatccatccatcctcccacccccatacatacttgactgtaatcctggtaccagtcctagtgtgagagcctttagcatatgctcttcagaaattgctgtttgttgtgccactttctttggacaggctttaaaataagaattcagatagatcaccagctcagcagcctcagctgaactctgtatttcatgacctgcccagacttcatagggaagtaactgcacattccaaggctccttggatgatgaggtattgttcataactgtactgccacacaattactactctacttttaaggagggctgcagtgtaattaaaatcactgaaggagcagaaaaccaatccctggctacagagttgatcacagagagagtttctaagtaacagcaacagcagtcaatcttcccacaagctcccagggctgtgcatgtggatgaggggtaattgtgttgttatatgccatcctcaagtttccctaggaagagattttcaaataaaggtactcattaatgaaagagatgcactaagccctaaagttgtctgcctatggacagcaaggagtagagtcaaaaagaagtagtattctttacagacggatgagctagagcaggctaaatttgctgcaattatgttcattaatgaagctagtttctccctaggtgtctaagatggaggaaagggtgttcttcctgattttaatgctgcattcttttcagacagacaaaatagatagacacatcactgaataccagtgataactttgcatagtgcagcaggatcaaagagttcactctctaggagattcattaacttccccaaatcaccctctctcccctctgcatcccccacctccccacttccccacacacacttgtgtgctgacacaatgtcactgaactatgaaaggttctaacctctaccctcaagtctcctcctcttccccaaaacacttacagaatgcttgttctgtgcaaggcacatgctagtcactaggaccacaatgaaatgatagaaccatggatccacacctcaagacatttactggagaattgcatgactgggagaaaggtattagcagaaaaatcacatgctaagcaacctgtgggtggttgagaagaattaaaatgttgttacaggacctcaaagcagagagaggtagccatgggaaaaggcttacagcttaagttaagtgtttgaggaaagacagagccttggagagcagggaattttggggacattgtcaacaagaggaatgctcagggcagagcaaggaagtagggtgctgctcacagtctctgtgctacacagattctctggctgctctgtgaatgaccaaggaagaacaccaggcgcatactcacccatcttatcttcatggatttcaaatcagattttgaaatccatttcattacccaaactaatctactttgaattcaataagccataaataaaagggaaggtagcagcttaaatcattttatgtaagccattaactcatgaattgcctctctttttctgctctgcatgataactcagagctttagagcttacagggcacaagttatgttatggtcttttttcctgctcatataacagaatatcatagactggataaagaacagaagtgtatttggctcatggttttggagtctgggaagtccaagagcatagcaccagcacctacaagggtcatctcatggcagaagtatggaaggcacaagcaaacatgtaagacacaaggagaaggaaagcacaaggggcagactctcttttataacaacccactctcatgataactaacctgctcccatgatactgacatcttatgaggccccacttcccaaccctgttgcattgatcattaagttcccagcacattaatttaggagacacactcaaactatcatatgctttaagctttgtgactctgggcaagttatttaacctttccatgccacagactttcatctataaaatgaggtaaatgatacatgcattgcaaagataaggtgttgtctatataaagcttaagatagtgcctggtccatgtaggtggttaataaataaagcttttattactgttattaccagcttcattcatattcttgaccctttcccacccaatacatgtccccaaagccttatttgcttgccagcacagatatgcaaggggatgggggatcctttgggaacaatgctgtccaatatggtagccactaaccacatgtagctacttacgtttaaattcattaagagaaaataaaatttcaaactcagttcctcagtcagacttgctttatttcaaggactcaatagttgcgtgagactaagacctcccatactggacagcacagatatagaatattaccatcatcagaggaagatctatttgacagcctggtttaggaatattttttgctgcaagcaacagtaaatccatcttacagggattacataaatggtttttaaccaagggtaacattatgccccaggaaacattttggaatatctgacatttttgatggtaacaaatatggggcttctattcatatctagtgggtagaggccaaggatgctgctaaacttcctgcagtgcaccggacagtcccccacacaaagaattattcagccccaaatgtcaatagtgtcaagattgagaaaccctggattatacaaatagaacgtatttttctcatgtagctagaagttaggggctcattgctgctggagtcagtgattcaatagtgtcagagccagcacattgtgattccctttgctcttcctacataatgataaaatggttgctatagctccagtaatcacattctatttcaagatagaaaggaagaggaaagggacatagggccaactgtgtccagagcatgttggctgaagtcccaaactaagtcctggactattacaatggcaaagggattaaaccaaaatgttcatcagaaatgtacaagtcttcagggctgggtgcggtggctcacgcctgtaatctcaggactttgagatgctgaggcgggcggatcacctgaggtcaggagttcgagaccagcctggccaatatggtaaaaccccatgtctactaaaaatataaaattagctgggcacggtggtgggcacctgtaatctcaactactctggaggctgaagcaggagaattgcttgaatccgggaagcggaggttacagtgagctgagatcgcaccactgcactccagcctgggtgacagagtgagactccatctcaaaaaaaaaaaaaaaaaacagaaaagaaaaaatgtacaagtcttccagaacactagcaccatgacctccacacacttttacagagttccgaaatactactcctgctaatatttcatatttaatacttttactactcctgtacttaaaaaaatacatacacctttaaaaatagcacattttggtgatttttaattatctgaaattttttttgcatgtgtagccctgagtccagaatctgttaaactcttgtattgttgaagacttttcacaagggaaaagtcttttaacttttaaccaggagagaaaagctttccaaaaaacctcccccaggaaattttcacttatatctcaaaggatggaattgggtcatattgttatccctagatgtaaaggaagctggaaaatcaaggatttgactttctaacctttgtatgagaaacagccagggaggaaagggtataaatgacttttgtatctgccccagtatacacatggaccatggtctaacacacaaccctgagcagttatttataaaataaagggatatctgtagatcacaaatgtccatcatgctatgacatcttcaaaatgtgaaagatcacttgagaaaaactctttacagtgttttcagattgcttaaaagatacatgtctcttattttgagactctgtgagatagagtgaattatttttcttttctcttttgcctctaagaacagcggggcttagtaaagttaaatggccaagtggcaagccacatagaaaagaaaaaactgaaaaccaggtcacatggtattcagtccagccctctttcttttggaatctcaaacacttgttaagtctgcctcaagttttcaatctcttcaataatagttaataatgaggctcaggccattgaaattgcttgcccaggggttgtacagttaatactaaatgccagagccaggagtaaagcccagctctacatgactccagagtccatgtatgatatcagcttcaacctttctctgctacagaatcatcaccataaatcacatggtcctcctgtgcccctaccccaaaatcatgcagtagatccataaggctgatagaataaaggctaaatgaattagtgtggtattcaagactctccatcacctggtctcaagccaattttccaaccaaatgcccaaccaatcctgcaactacccctaaaccccctcgtcccccacctgccatacacacttccttcagctccatcaggtaactcactatgcctatgatggtcaaatgccattcccctaccccttctctatgtattaaaatatgctcagcttaaaagccacctcctcttagaagcctccaagataagttagtctctatgttttttatgccctggcctcactgtttgtgattctctagagaagagcttctcaaattttaatatgcatatgaatcactagagcgtcaagttaaaaggcagattgtgattcagtagctctgagttgggtctgagtctacattgctaataagctcccatgtaatgtgacactgctgctctatagcatgtgtcatattctacctcatagttaatattggccatgcctagttcccctcgtgattacagccttcctgaggcaagaaccatagaccctcaaaccctagtgtggcacctggaacataaataagtgtctaaaattgagtgaaaattagaaataaaactgcagaacaattcattctcccatccaacttttactcgtcttcagatgtaaatagttttatagtttgagacaggcataaaaatatataataatgaaattaaaggtccattttccaacaatctgacaactattgcttgaagtagacccttgacaaataacgaatgaatgaaagtgaatgaaacttagctgcccagagcaggactcaaatcttttaggatgagtctgattccttgaccagaagccaacgtcatgatgatttcttcttccctgcaggcatctccagctgccctggcaaagagcgtgctggctgaagtcccaaaccaagttgtggactattacaatggcaaaggaattaaaccaaaatgttcatcagaaatgtatgaatcttccagaacactagcaccatgaactccccacacagttttacagagttctgaaatactattcctgctaatatttcatatttaatacttctactactcctgtactttaaaaaaccaacaacatatacacatttaaaaatagcacgttttggtgatttttaactatctgacaattttttttgcatgtgtagccctgaggcctggatctgttaagcccttgtattgttaactttttacaaagaaacacagataacaataacttactatttacattacagcatgtcgccttgaaataaaatggtatctgtatccattttttatacaggtttgttgaaattttgctaaatttcttatctttacactctaaagcattttgaaacatttactgaatgttgatagacgaaatatacttggttttatctgctataggatgagagactttttaaaatggcagatgcatggactgtattttgcatgtttaaaataaaaaaagaaaaacccacatggtttttgcagttgttatctctaattcctccctgctgagaatggtctctctactaaagaagaggtttatttacttcttctttctgaggtgagtctttttgaggtaagtctgggtcatctagcccagcacctctcatactttatactgtgtacacaaatcacctgagagtcttattaaaattcagattgtgatacataggtctgtgtgggacccaagattctgcatctttaactaggtcccaggtgatgctaatgcagtccctggactataccaagaggagtgaggatctagactttagggtgtcatgatggagaccatcaaaaacagcgtggcttctagtctgcttgagaatggcacctcttcctgacagtagcacaaaagtcctgcctgtctccagaggtgacagtagaaagtaatgagactgactccagaagctgcacacctcaaatcagtctcgctgctttatactcacacctcttccttagataagactagaaagtgctcctcctggccagtccctgccctcttaaaagtggcatcacacaccactgcatggatggtgtcaatccctagaagtgatctcaaagcgtcttcactggaaccacaacaatagaaacttacacatggcaaatggctatgcagtacagctcccgatatctggtccactaaattgacctttgagcttagtgtgggaatttcttgcctcctttctatcacttctgagaacaaattctataagcagaaatgcctggaattattgtctggggtcgaggtgttttgtttcaatataagctggccagtctggaaccaaaaggacgaatgtttaacttgtataatcttcttgcagggaaacaggcaagtgtttttgcaagcataaaaggcacaaagtggagtttatttttggtcagagagatgaagaagtaaatcacaaggcaaaatttgttgtttgtttgaagaggggagcagtattaacaagcaaataaaatgccttctatgatttccacagttacaattatagatcctaatcttgcaaatacatgtcaccaaatgcacaacattttgggaatgatggtaaaattgtatgactgaaaaaatcataaatatttaagctatattgttttattaataaattgggtacttacagaattcttctaagagtt

SEQ ID NO: 2 - DNA, 751856 bp, Homo sapiens; identical to SEQ ID NO: 1
  source 1..751856: mol_type = genomic DNA

SEQ ID NO: 3 - DNA, 1641 bp, Homo sapiens
  source 1..1641: mol_type = genomic DNA
attgcccacagccggatccacggtgactaatctccgggaaggcgtccagcgtgagccgtgaggcctgcacctgcgccggacttcaccactcaccaggagtctctgcccgccgcccccagcgcggttctcttccctgctagacgtaaagtcctggggacaagcacagcccagggcactttctggagagaagatttcgatggggaaagataagagagcatttggatatctacgcactgtcaacagaaatgaggcttcaggccaaggcttctaaaatgcaggattcccaaagtggcagtcacataagacgggtccctccatcgccttctagaatattgagaagatcatcacgcctgggactggctcacagcactgatctttttcttgttagcagagactccaggaagcagatgagcagacctatgggcctgctatgtgcaccgcggcccacactgccgcctgcctgggatcctgcatcacccgagtcttcctgcggaccaccctgggtggtgcacatgcggtcatcattgtgcaaaggaagctttagttctataatgaaagcccctttagtaagtgatgctccttgaagactcggtcagcgtctcgttcacctctttatccccagacttagcacaattccagccccaaatcggcaacggacctttgaccaagtgacatgtcagtgcttcagggagcttcactgatcaggacagaagtgagtgactggaggaaggtgacccggatgtctgtaacccccagaaagggtgagatggctgttttatcagccagcattgccgagttggtggtgtgacgacatcctgtctgactgctgggccttaccggtgtgttctctgctggagccgtgacagtttgagttgaggacattttacatcaatcactgaactgcacgaaagatggaaatccagcaagggaccccgtcggacctgattgaccgcagagctaccttttgctctttctggatgccacacggcctcctcctcccacctgtccttggagcttgtgttggtccactttcatgctgctgataaagccatacctgagactgggtaatttataaagaaaaagaggttgaatggactcacagttccacgtggctggggaggcctcacaatcacggcggaagttgaaaggcacgtcttacatggcggcaggcaagagagaatgagagccaagcaaagggggtttccccttatagaaccatcagatcagctgggcgcagtggctcactcctgtaatcccagcactttgggatgctgaggtgggaggatcacaaggtcaggagtttgagaccagcctgaccaatatggtgaaaccccatctctactaaaaatacaaaaattatctgggcatggtggtgggcacctgtagtcccagctactcgggaggctgaggcaggagaatcgcttgaacctgggaggcggaggttgcagtgagctgagattgtgccactgcactctagcctgggcaacaaagcgagacgctgtctcaaaaaaacaaaaacaaaaacaaaaaaaaccatcagatctcatgagacttattcactaccatgagaacagtatgggggaaaccaccctcatgattcaattatctcttgctgggtccctccctcaacacatgggaatt

SEQ ID NO: 4 - DNA, 559 bp, Homo sapiens
  source 1..559: mol_type = genomic DNA
agccccaagcttaccacctgcacccggagagctgtgtcaccatgtgggtcccggttgtcttcctcaccctgtccgtgacgtggattgcaccccctctgcaggtgcttgtggcctctcgtggcagggcagtctgcggcggtgttctggtgcacccccagtgggtcctcacagctgcccactgcatcaggaacaaaagcgtgatcttgctgggtcggcacagcctgtttcatcctgaagacacaggccaggtatttcaggtcagccacagcttcccacacccgctctacgatatgagcctcctgaagaatcgattcctcaggccaggtgatgactccagccacgacctcatgctgctccgcctgtcagagcctgccgagctcacggatgctgtgaaggtcatggacctgcccacccaggagccagcactggggaccacctgctacgcctcaggctggggcagcattgaaccagaggagttcttgaccccaaagaaacttcagtgtgtggacctccatgttatttccaatgacgtgtgtgcgcaagttcaccctcagaaggt

SEQ ID NO: 5 - DNA, 1130 bp, Homo sapiens
  source 1..1130: mol_type = genomic DNA
agccccaagcttaccacctgcacccggagagctgtgtcaccatgtgggtcccggttgtcttcctcaccctgtccgtgacgtggattggtgagaggggccatggttggggggatgcaggagagggagccagccctgactgtcaagctgaggctctttcccccccaacccagcaccccagcccagacagggagctgggctcttttctgtctctcccagccccactccaagcccatacccccagcccctccatattgcaacagtcctcactcccacaccaggtccccgctccctcccacttaccccagaactttctccccattgcccagccagctccctgctcccagctgctttactaaaggggaagttcctgggcatctccgtgtttctctttgtggggctcaaaacctccaaggacctctctcaatgccattggttccttggaccgtatcactggtccacctcctgagcccctcaatcctatcacagtctactgacttttcccattcagctgtgctgcacccctcatcctgtctcggattgtgggaggctgggagtgcgagaagcattcccaaccctggcaggtgcttgtggcctctcgtggcagggcagtctgcggcggtgttctggtgcacccccagtgggtcctcacagctgcccactgcatcaggaacaaaagcgtgatcttgctgggtcggcacagcctgtttcatcctgaagacacaggccaggtatttcaggtcagccacagcttcccacacccgctctacgatatgagcctcctgaagaatcgattcctcaggccaggtgatgactccagccacgacctcatgctgctccgcctgtcagagcctgccgagctcacggatgctgtgaaggtcatggacctgcccacccaggagccagcactggggaccacctgctacgcctcaggctggggcagcattgaaccagaggagttcttgaccccaaagaaacttcagtgtgtggacctccatgttatttccaatgacgtgtgtgcgcaagttcaccctcagaaggtgaccaagttcatgctgtgtgctggacgctggacagggggcaaaagcacctgctcgggtgattctgggggcccacttgtctgtaatggtgtg

SEQ ID NO: 6 - DNA, 1464 bp, Homo sapiens
  source 1..1464: mol_type = genomic DNA
agccccaagcttaccacctgcacccggagagctgtgtcaccatgtgggtcccggttgtcttcctcaccctgtccgtgacgtggattggtgctgcacccctcatcctgtctcggattgtgggaggctgggagtgcgagaagcattcccaaccctggcaggtgcttgtggcctctcgtggcagggcagtctgcggcggtgttctggtgcacccccagtgggtcctcacagctgcccactgcatcaggaacaaaagcgtgatcttgctgggtcggcacagcctgtttcatcctgaagacacaggccaggtatttcaggtcagccacagcttcccacacccgctctacgatatgagcctcctgaagaatcgattcctcaggccaggtgatgactccagccacgacctcatgctgctccgcctgtcagagcctgccgagctcacggatgctgtgaaggtcatggacctgcccacccaggagccagcactggggaccacctgctacgcctcaggctggggcagcattgaaccagaggagttcttgaccccaaagaaacttcagtgtgtggacctccatgttatttccaatgacgtgtgtgcgcaagttcaccctcagaaggtgaccaagttcatgctgtgtgctggacgctggacagggggcaaaagcacctgctcgggtgattctgggggcccacttgtctgtaatggtgtgcttcaaggtatcacgtcatggggcagtgaaccatgtgccctgcccgaaaggccttccctgtacaccaaggtggtgcattaccggaagtggatcaaggacaccatcgtggccaacccctgagcacccctatcaaccccctattgtagtaaacttggaaccttggaaatgaccaggccaagactcaagcctccccagttctactgacctttgtccttaggtgtgaggtccagggttgctaggaaaagaaatcagcagacacaggtgtagaccagagtgtttcttaaatggtgtaattttgtcctctctgtgtcctggggaatactggccatgcctggagacatatcactcaatttctctgaggacacagataggatggggtgtctgtgttatttgtggggtacagagatgaaagaggggtgggatccacactgagagagtggagagtgacatgtgctggacactgtccatgaagcactgagcagaagctggaggcacaacgcaccagacactcacagcaaggatggagctgaaaacataacccactctgtcctggaggcactgggaagcctagagaaggctgtgagccaaggagggagggtcttcctttggcatgggatggggatgaagtaaggagagggactggaccccctggaagctgattcactatggggggaggtgtattgaagtcctccagacaaccctcagatttgatgatttcctagtagaactcacagaaataaagagctgttatactgtg

SEQ ID NO: 7 - DNA, 1393 bp, Homo sapiens
  source 1..1393: mol_type = genomic DNA
agccccaagcttaccacctgcacccggagagctgtgtcaccatgtgggtcccggttgtcttcctcaccctgtccgtgacgtggattggtgctgcacccctcatcctgtctcggattgtgggaggctgggagtgcgagaagcattcccaaccctggcaggtgcttgtggcctctcgtggcagggcagtctgcggcggtgttctggtgcacccccagtgggtcctcacagctgcccactgcatcaggaacaaaagcgtgatcttgctgggtcggcacagcctgtttcatcctgaagacacaggccaggccaggtgatgactccagccacgacctcatgctgctccgcctgtcagagcctgccgagctcacggatgctgtgaaggtcatggacctgcccacccaggagccagcactggggaccacctgctacgcctcaggctggggcagcattgaaccagaggagttcttgaccccaaagaaacttcagtgtgtggacctccatgttatttccaatgacgtgtgtgcgcaagttcaccctcagaaggtgaccaagttcatgctgtgtgctggacgctggacagggggcaaaagcacctgctcgggtgattctgggggcccacttgtctgtaatggtgtgcttcaaggtatcacgtcatggggcagtgaaccatgtgccctgcccgaaaggccttccctgtacaccaaggtggtgcattaccggaagtggatcaaggacaccatcgtggccaacccctgagcacccctatcaaccccctattgtagtaaacttggaaccttggaaatgaccaggccaagactcaagcctccccagttctactgacctttgtccttaggtgtgaggtccagggttgctaggaaaagaaatcagcagacacaggtgtagaccagagtgtttcttaaatggtgtaattttgtcctctctgtgtcctggggaatactggccatgcctggagacatatcactcaatttctctgaggacacagataggatggggtgtctgtgttatttgtggggtacagagatgaaagaggggtgggatccacactgagagagtggagagtgacatgtgctggacactgtccatgaagcactgagcagaagctggaggcacaacgcaccagacactcacagcaaggatggagctgaaaacataacccactctgtcctggaggcactgggaagcctagagaaggctgtgagccaaggagggagggtcttcctttggcatgggatggggatgaagtaaggagagggactggaccccctggaagctgattcactatggggggaggtgtattgaagtcctccagacaaccctcagatttgatgatttcctagtagaactcacagaaataaagagctgttatactgtg

SEQ ID NO: 8 - DNA, 2702 bp, Homo sapiens
  source 1..2702: mol_type = genomic DNA
agccccaagcttaccacctgcacccggagagctgtgtcaccatgtgggtcccggttgtcttcctcaccctgtccgtgacgtggattggtgagaggggccatggttggggggatgcaggagagggagccagccctgactgtcaagctgaggctctttcccccccaacccagcaccccagcccagacagggagctgggctcttttctgtctctcccagccccactccaagcccatacccccagcccctccatattgcaacagtcctcactcccacaccaggtccccgctccctcccacttaccccagaactttctccccattgcccagccagctccctgctcccagctgctttactaaaggggaagttcctgggcatctccgtgtttctctttgtggggctcaaaacctccaaggacctctctcaatgccattggttccttggaccgtatcactggtccacctcctgagcccctcaatcctatcacagtctactgacttttcccattcagctgtgagtgcccaaccctatcccagagaccttgatgcttggcctcccaatcttgccctaggatacccagatgccaaccagacacctccttcttcctagccaggctatctggcctgagacaacaaatgggtccctcagtctggcaatgggactctgagaactcctcattccctgactcttagccccagactcttcattcagtggcccacattttccttaggaaaaacatgagcatccccagccacaactgccagctctctgattccccaaatctgcatccttttcaaaacctaaaaacaaaaagaaaaacaaataaaacaaaaccaactcagaccagaactgttttctcaacctgggacttcctaaactttccaaaaccttcctcttccagcaactgaacctcgccataaggcacttatccctggttcctagcaccgcttatcccctcagaatccacaacttgtaccaagtttcccttctcccagtccaagaccccaaatcaccacaaaggacccaatccccagactcaagatatggtctgggcgctgtcttgtgtctcctaccctgatccctgggttcaactctgctcccagagcatgaagcctctccaccagcaccagccaccaacctgcaaacctagggaagattgacagaattcccagcctttcccagctccccctgcccatgtcccaggactcccagccttggttctctgcccccgtgtcttttcaaacccacatcctaaatccatctcctatccgagtcccccagttcctcctgtcaaccctgattcccctgatctagcaccccctctgcaggtgctgcacccctcatcctgtctcggattgtgggaggctgggagtgcgagaagcattcccaaccctggcaggtgcttgtggcctctcgtggcagggcagtctgcggcggtgttctggtgcacccccagtgggtcctcacagctgcccactgcatcaggaacaaaagcgtgatcttgctgggtcggcacagcctgtttcatcctgaagacacaggccaggtatttcaggtcagccacagcttcccacacccgctctacgatatgagcctcctgaagaatcgattcctcaggccaggtgatgactccagccacgacctcatgctgctccgcctgtcagagcctgccgagctcacggatgctgtgaaggtcatggacctgcccacccaggagccagcactggggaccacctgctacgcctcaggctggggcagcattgaaccagaggagttcttgaccccaaagaaacttcagtgtgtggacctccatgttatttccaatgacgtgtgtgcgcaagttcaccctcagaaggtgaccaagttcatgctgtgtgctggacgctggacagggggcaaaagcacctgctcgggtgattctgggggcccacttgtctgtaatggtgtgcttcaaggtatcacgtcatggggcagtgaaccatgtgccctgcccgaaaggccttccctgtacaccaaggtggtgcattaccggaagtggatcaaggacaccatcgtggccaacccctgagcacccctatcaaccccctattgtagtaaacttggaaccttggaaatgaccaggccaagactcaagcctccccagttctactgacctttgtccttaggtgtgaggtccagggttgctaggaaaagaaatcagcagacacaggtgtagaccagagtgtttcttaaatggtgtaattttgtcctctctgtgtcctggggaatactggccatgcctggagacatatcactcaatttctctgaggacacagataggatggggtgtctgtgttatttgtggggtacagagatgaaagaggggtgggatccacactgagagagtggagagtgacatgtgctggacactgtccatgaagcactgagcagaagctggaggcacaacgcaccagacactcacagcaaggatggagctgaaaacataacccactctgtcctggaggcactgggaagcctagagaaggctgtgagccaaggagggagggtcttcctttggcatgggatggggatgaagtaaggagagggactggaccccctggaagctgattcactatggggggaggtgtattgaagtcctccagacaaccctcagatttgatgatttcctagtagaactcacagaaataaagagctgttatactgtg

SEQ ID NO: 9 - DNA, 571 bp, Homo sapiens
  source 1..571: mol_type = genomic DNA
aagcttaccacctgcacccggagagctgtgtcaccatgtgggtcccggttgtcttcctcaccctgtccgtgacgtggattggtgctgcacccctcatcctgtctcggattgtgggaggctgggagtgcgagaagcattcccaaccctggcaggtgcttgtggcctctcgtggcagggcagtctgcggcggtgttctggtgcacccccagtgggtcctcacagctgcccactgcatcaggaagtgagtaggggcctggggtctggggagcaggtgtctgtgtcccagaggaataacagctgggcattttccccaggataacctctaaggccagccttgggactgggggagagagggaaagttctggttcaggtcacatggggaggcagggttggggctggaccaccctccccatggctgcctgggtctccatctgtgttcctctatgtctctttgtgtcgctttcattatgtctcttggtaactggcttcggttgtgtctctccgtgtgactattttgttctctctctccctctcttctctgtcttcagtctccatatctccccctctctct

SEQ ID NO: 10 - DNA, 552 bp, Homo sapiens
  source 1..552: mol_type = genomic DNA
aagcttaccacctgcacccggagagctgtgtcaccatgtgggtcccggttgtcttcctcaccctggcagtctgcggcggtgttctggtgcacccccagtgggtcctcacagctgcccactgcatcaggaacaaaagcgtgatcttgctgggtcggcacagcctgtttcatcctgaagacacaggccaggtatttcaggtcagccacagcttcccacacccgctctacgatatgagcctcctgaagaatcgattcctcaggccaggtgatgactccagccacgacctcatgctgctccgcctgtcagagcctgccgagctcacggatgctgtgaaggtcatggacctgcccacccaggagccagcactggggaccacctgctacgcctcaggctggggcagcattgaaccagaggagttcttgaccccaaagaaacttcagtgtgtggacctccatgttatttccaatgacgtgtgtgcgcaagttcaccctcagaaggtgaccaagttcatgctgtgtgctggacgctggacagggggcaaaagcacctgct

SEQ ID NO: 11 - DNA, 1599 bp, Homo sapiens
  source 1..1599: mol_type = genomic DNA
aagcttaccacctgcacccggagagctgtgtcaccatgtgggtcccggttgtcttcctcaccctgtccgtgacgtggattggtgctgcacccctcatcctgtctcggattgtgggaggctgggagtgcgagaagcattcccaaccctggcaggtgcttgtggcctctcgtggcagggcagtctgcggcggtgttctggtgcacccccagtgggtcctcacagctgcccactgcatcaggaacaaaagcgtgatcttgctgggtcggcacagcctgtttcatcctgaagacacaggccaggtatttcaggtcagccacagcttcccacacccgctctacgatatgagcctcctgaagaatcgattcctcaggccaggtgatgactccagccacgacctcatgctgctccgcctgtcagagcctgccgagctcacggatgctgtgaaggtcatggacctgcccacccaggagccagcactggggaccacctgctacgcctcaggctggggcagcattgaaccagaggagtgtacgcctgggccagatggtgcagccgggagcccagatgcctgggtctgagggaggaggggacaggactcctaggtctgagggaggagggccaaggaaccaggtggggtccagcccacaacagtgtttttgcctggcccgtagtcttgaccccaaagaaacttcagtgtgtggacctccatgttatttccaatgacgtgtgtgcgcaagttcaccctcagaaggtgaccaagttcatgctgtgtgctggacgctggacagggggcaaaagcacctgctcgggtgattctgggggcccacttgtctgtaatggtgtgcttcaaggtatcacgtcatggggcagtgaaccatgtgccctgcccgaaaggccttccctgtacaccaaggtggtgcattaccggaagtggatcaaggacaccatcgtggccaacccctgagcacccctatcaaccccctattgtagtaaacttggaaccttggaaatgaccaggccaagactcaagcctccccagttctactgacctttgtccttaggtgtgaggtccagggttgctaggaaaagaaatcagcagacacaggtgtagaccagagtgtttcttaaatggtgtaattttgtcctctctgtgtcctggggaatactggccatgcctggagacatatcactcaatttctctgaggacacagataggatggggtgtctgtgttatttgtggggtacagagatgaaagaggggtgggatccacactgagagagtggagagtgacatgtgctggacactgtccatgaagcactgagcagaagctggaggcacaacgcaccagacactcacagcaaggatggagctgaaaacataacccactctgtcctggaggcactgggaagcctagagaaggctgtgagccaaggagggagggtcttcctttggcatgggatggggatgaagtaaggagagggactggaccccctggaagctgattcactatggggggaggtgtattgaagtcctccagacaaccctcagatttgatgatttcctagtagaactcacagaaataaagagctgttatactg

SEQ ID NO: 12 - DNA, 810 bp, Homo sapiens
  source 1..810: mol_type = genomic DNA
acctgcacccggagagctgtgtcaccatgtgggtcccggttgtcttcctcaccctgtccgtgacgtggattggtgctgcacccctcatcctgtctcggattgtgggaggctgggagtgcgagaagcattcccaaccctggcaggtgcttgtggcctctcgtggcagggcagtctgcggcggtgttctggtgcacccccagtgggtcctcacagctgcccactgcatcaggaagccaggtgatgactccagccacgacctcatgctgctccgcctgtcagagcctgccgagctcacggatgctgtgaaggtcatggacctgcccacccaggagccagcactggggaccacctgctacgcctcaggctggggcagcattgaaccagaggagttcttgaccccaaagaaacttcagtgtgtggacctccatgttatttccaatgacgtgtgtgcgcaagttcaccctcagaaggtgaccaagttcatgctgtgtgctggacgctggacagggggcaaaagcacctgctcgtgggtcattctgatcaccgaactgaccatgccagccctgccgatggtcctccatggctccctagtgccctggagaggaggtgtctagtcagagagtagtcctggaaggtggcctctgtgaggagccacggggacagcatcctgcagatggtcctggcccttgtcccaccgacctgtctacaaggactgtcctcgtggaccctcccctctgcacaggagctggaccctgaagtcccttccccaccggccaggactggagcccctacccctctgttggaatccct

SEQ ID NO: 13 - DNA, 1035 bp, Homo sapiens
  source 1..1035: mol_type = genomic DNA
cacccggagagctgtgtcaccatgtgggtcccggttgtcttcctcaccctgtccgtgacgtggattggtgctgcacccctcatcctgtctcggattgtgggaggctgggagtgcgagaagcattcccaaccctggcaggtgcttgtggcctctcgtggcagggcagtctgcggcggtgttctggtgcacccccagtgggtcctcacagctgcccactgcatcaggaacaaaagcgtgatcttgctgggtcggcacagcctgtttcatcctgaagacacaggccaggtatttcaggtcagccacagcttcccacacccgctctacgatatgagcctcctgaagaatcgattcctcaggccaggtgatgactccagccacgacctcatgctgctccgcctgtcagagcctgccgagctcacggatgctgtgaaggtcatggacctgcccacccaggagccagcactggggaccacctgctacgcctcaggctggggcagcattgaaccagaggagttcttgaccccaaagaaacttcagtgtgtggacctccatgttatttccaatgacgtgtgtgcgcaagttcaccctcagaaggtgaccaagttcatgctgtgtgctggacgctggacagggggcaaaagcacctgctcggtgagtcatccctactcccaagatcttgaggggaaaggtgagtggggaccttaattctgggctggggtctagaagccaacaaggcgtctgcctcccctgctccccagctgtagccatgccacctccccgtgtctcatctcattccctccttccctcttctttgactccctcaaggcaataggttattcttacagcacaactcatctgttcctgcgttcagcacacggttactaggcacctgctatgcacccagcactgccctagagcctgggacatagcagtgaacagacagagagcagcccctcccttctgtagcccccaagccagtgaggggcacaggcaggaacagggaccacaacacagaaaagctggagggtgtcagga

SEQ ID NO: 14 - DNA, 834 bp, Homo sapiens
  source 1..834: mol_type = genomic DNA
cacccggagagctgtgtcaccatgtgggtcccggttgtcttcctcaccctgtccgtgacgtggattggtgctgcacccctcatcctgtctcggattgtgggaggctgggagtgcgagaagcattcccaaccctggcaggtgcttgtggcctctcgtggcagggcagtctgcggcggtgttctggtgcacccccagtgggtcctcacagctgcccactgcatcaggaacaaaagcgtgatcttgctgggtcggcacagcctgtttcatcctgaagacacaggccaggtatttcaggtcagccacagcttcccacacccgctctacgatatgagcctcctgaagaatcgattcctcaggccaggtgatgactccacattgaaccagaggagttcttgaccccaaagaaacttcagtgtgtggacctccatgttatttccaatgacgtgtgtgcgcaagttcaccctcagaaggtgaccaagttcatgctgtgtgctggacgctggacagggggcaaaagcacctgctcgggtgattctgggggcccacttgtctgtaatggtgtgcttcaaggtatcacgtcatggggcagtgaaccatgtgccctgcccgaaaggccttccctgtacaccaaggtggtgcattaccggaagtggatcaaggacaccatcgtggccaacccctgagcacccctatcaaccccctattgtagtaaacttggaaccttggaaatgaccaggccaagactcaagcctccccagttctactgacctttgtccttaggtgtgaggtccagggttgctaggaaaagaaatcagcagacacaggtgtagacca

SEQ ID NO: 15 - DNA, 969 bp, Homo sapiens
  source 1..969: mol_type = genomic DNA
tgtcaccatgtgggtcccggttgtcttcctcaccctgtccgtgacgtggattggtgctgcacccctcatcctgtctcggattgtgggaggctgggagtgcgagaagcattcccaaccctggcaggtgcttgtggcctctcgtggcagggcagtctgcggcggtgttctggtgcacccccagtgggtcctcacagctgcccactgcatcaggaagccaggtgatgactccagccacgacctcatgctgctccgcctgtcagagcctgccgagctcacggatgctgtgaaggtcatggacctgcccacccaggagccagcactggggaccacctgctacgcctcaggctggggcagcattgaaccagaggagttcttgaccccaaagaaacttcagtgtgtggacctccatgttatttccaatgacgtgtgtgcgcaagttcaccctcagaaggtgaccaagttcatgctgtgtgctggacgctggacagggggcaaaagcacctgctcgggtgattctgggggcccacttgtctgtaatggtgtgcttcaaggtatcacgtcatggggcagtgaaccatgtgccctgcccgaaaggccttccctgtacaccaaggtggtgcattaccggaagtggatcaaggacaccatcgtggccaacccctgagcacccctatcaaccccctattgtagtaaacttggaaccttggaaatgaccaggccaagactcaagcctccccagttctactgacctttgtccttaggtgtgaggtccagggttgctaggaaaagaaatcagcagacacaggtgtagaccagagtgtttcttaaatggtgtaattttgtcctctctgtgtcctggggaatactggccatgcctggagacatatcactcaatttctctgaggacacagataggatggggtgtctgtgttatttgtggggtacagagatgaaagaggggtgggatcc

SEQ ID NO: 16 - DNA, 1664 bp, Homo sapiens
  source 1..1664: mol_type = genomic DNA
atgtgggtcccggttgtcttcctcaccctgtccgtgacgtggattggtgctgcacccctcatcctgtctcggattgtgggaggctgggagtgcgagaagcattcccaaccctggcaggtgcttgtggcctctcgtggcagggcagtctgcggcggtgttctggtgcacccccagtgggtcctcacagctgcccactgcatcaggaacaaaagcgtgatcttgctgggtcggcacagcctgtttcatcctgaagacacaggccaggtatttcaggtcagccacagcttcccacacccgctctacgatatgagcctcctgaagaatcgattcctcaggccaggtgatgactccagccacgacctcatgctgctccgcctgtcagagcctgccgagctcacggatgctgtgaaggtcatggacctgcccacccaggagccagcactggggaccacctgctacgcctcaggctggggcagcattgaaccagaggagttcttgaccccaaagaaacttcagtgtgtggacctccatgttatttccaatgacgtgtgtgcgcaagttcaccctcagaaggtgaccaagttcatgctgtgtgctggacgctggacagggggcaaaagcacctgctcgtgggtcattctgatcaccgaactgaccatgccagccctgccgatggtcctccatggctccctagtgccctggagaggaggtgtctagtcagagagtagtcctggaaggtggcctctgtgaggagccacggggacagcatcctgcagatggtcctggcccttgtcccaccgacctgtctacaaggactgtcctcgtggaccctcccctctgcacaggagctggaccctgaagtcccttccccaccggccaggactggagcccctacccctctgttggaatccctgcccaccttcttctggaagtcggctctggagacatttctctcttcttccaaagctgggaactgctatctgttatctgcctgtccaggtctgaaagataggattgcccaggcagaaactgggactgacctatctcactctctccctgcttttacccttagggtgattctgggggcccacttgtctgtaatggtgtgcttcaaggtatcacgtcatggggcagtgaaccatgtgccctgcccgaaaggccttccctgtacaccaaggtggtgcattaccggaagtggatcaaggacaccatcgtggccaacccctgagcacccctatcaaccccctattgtagtaaacttggaaccttggaaatgaccaggccaagactcaagcctccccagttctactgacctttgtccttaggtgtgaggtccagggttgctaggaaaagaaatcagcagacacaggtgtagaccagagtgtttcttaaatggtgtaattttgtcctctctgtgtcctggggaatactggccatgcctggagacatatcactcaatttctctgaggacacagataggatggggtgtctgtgttatttgtggggtacagagatgaaagaggggtgggatccacactgagagagtggagagtgacatgtgctggacactgtccatgaagcactgagcagaagctggaggcacaacgcaccagacactcacagcaaggatggagctgaaaacataacccactctgtcctggagg

SEQ ID NO: 17 - DNA, 865 bp, Homo sapiens
  source 1..865: mol_type = genomic DNA
tcttcctcaccctgtccgtgacgtggattggtgctgcacccctcatcctgtctcggattgtgggaggctgggagtgcgagaagcattcccaaccctggcaggtgcttgtggcctctcgtggcagggcagtctgcggcggtgttctggtgcacccccagtgggtcctcacagctgcccactgcatcaggaacaaaagcgtgatcttgctgggtcggcacagcctgtttcatcctgaagacacaggccaggtatttcaggtcagccacagcttcccacacccgctctacgatatgagcctcctgaagaatcgattcctcaggccaggtgatgactccagccacgacctcatgctgctccgcctgtcagagcctgccgagctcacggatgctgtgaaggtcatggacctgcccacccaggagccagcactggggaccacctgctacgcctcaggctggggcagcattgaaccagaggagtgtacgcctgggccagatgtcttgaccccaaagaaacttcagtgtgtggacctccatgttatttccaatgacgtgtgtgcgcaagttcaccctcagaaggtgaccaagttcatgctgtgtgctggacgctggacagggggcaaaagcacctgctcgggtgattctgggggcccacttgtctgtaatggtgtgcttcaaggtatcacgtcatggggcagtgaaccatgtgccctgcccgaaaggccttccctgtacaccaaggtggtgcattaccggaagtggatcaaggacaccatcgtggccaacccctgagcacccctatcaaccccctattgtagtaaacttggaaccttggaaatgaccaggccaagactcaagcctccccagtt

SEQ ID NO: 18 - DNA, 1221 bp, Homo sapiens
  source 1..1221: mol_type = genomic DNA
ggaccctggggagcgaagtggaggatacaaccttgggcctgcaggccaggctacctacccacttggaaacccacgccaaagccgcatctacagctgagccactctgaggcctcccctccccagcggtccccactcagctccaaagtctctctcccttttctctcccacactctatcatcccccggattcctctctacttggttctcattcttcctttgacttcctgcttccctttctcattcatctgtttctcactttctgcctggttttgttcttctctctctctttctctggcccatgtctgtttctctatgtttctgtcttttctttctcatcctgtgtattttcggctcaccttgtttgtcactgttctcccctctgccctttcattctctctgtccttttaccctcttcctttttcccttggtttctctcagtttctgtatctgcccttcaccctctcacactgctgtttcccaactcgttgtctgtatttttggcctgaactgtgtcttccccaaccctgtgtttttctcactgtttctttttctcttttggagcctcctccttgctcctctgtcccttctctctttccttatcatcctcgctcctcattcctgcgtctgcttcctccccagcaaaagcgtgatcttgctgggtcggcacagcctgtttcatcctgaagacacaggccaggtatttcaggtcagccacagcttcccacacccgctctacgatatgagcctcctgaagaatcgattcctcaggccaggtgatgactccagccacgacctcatgctgctccgcctgtcagagcctgccgagctcacggatgctgtgaaggtcatggacctgcccacccaggagccagcactggggaccacctgctacgcctcaggctggggcagcattgaaccagaggagttcttgaccccaaagaaacttcagtgtgtggacctccatgttatttccaatgacgtgtgtgcgcaagttcaccctcagaaggtgaccaagttcatgctgtgtgctggacgctggacagggggcaaaagcacctgctcgggtgattctgggggcccacttgtctgtaatggtgtgcttcaaggtatcacgtcatggggcagtgaaccatgtgccctgcccgaaaggccttccctgtacaccaaggtggtgcattaccggaagtggatcaaggacaccatcgtggccaacccctgagca

SEQ ID NO: 19 - DNA, 3039 bp, Homo sapiens
  source 1..3039: mol_type = genomic DNA
ctcttgcgtcaagacggccgtgctgagcgaatgcaggcgacttgcgagctgggagcgatttaaaacgctttggattcccccggcctgggtggggagagcgagctgggtgccccctagattccccgcccccgcacctcatgagccgaccctcggctccatggagcccggcaattatgccaccttggatggagccaaggatatcgaaggcttgctgggagcgggaggggggcggaatctggtcgcccactcccctctgaccagccacccagcggcgcctacgctgatgcctgctgtcaactatgcccccttggatctgccaggctcggcggagccgccaaagcaatgccacccatgccctggggtgccccaggggacgtccccagctcccgtgccttatggttactttggaggcgggtactactcctgccgagtgtcccggagctcgctgaaaccctgtgcccaggcagccaccctggccgcgtaccccgcggagactcccacggccggggaagagtaccccagccgccccactgagtttgccttctatccgggatatccgggaacctaccagcctatggccagttacctggacgtgtctgtggtgcagactctgggtgctcctggagaaccgcgacatgactccctgttgcctgtggacagttaccagtcttgggctctcgctggtggctggaacagccagatgtgttgccagggagaacagaacccaccaggtcccttttggaaggcagcatttgcagactccagcgggcagcaccctcctgacgcctgcgcctttcgtcgcggccgcaagaaacgcattccgtacagcaaggggcagttgcgggagctggagcgggagtatgcggctaacaagttcatcaccaaggacaagaggcgcaagatctcggcagccaccagcctctcggagcgccagattaccatctggtttcagaaccgccgggtcaaagagaagaaggttctcgccaaggtgaagaacagcgctaccccttaagagatctccttgcctgggtgggaggagcgaaagtgggggtgtcctggggagaccaggaacctgccaagcccaggctggggccaaggactctgctgagaggcccctagagacaacacccttcccaggccactggctgctggactgttcctcaggagcggcctgggtacccagtatgtgcagggagacggaaccccatgtgacagcccactccaccagggttcccaaagaacctggcccagtcataatcattcatcctgacagtggcaataatcacgataaccagtactagctgccatgatcgttagcctcatattttctatctagagctctgtagagcactttagaaaccgctttcatgaattgagctaattatgaataaatttggaaggcgatccctttgcagggaagctttctctcagacccccttccattacacctctcaccctggtaacagcaggaagactgaggagaggggaacgggcagattcgttgtgtggctgtgatgtccgtttagcatttttctcagctgacagctgggtaggtggacaattgtagaggctgtctcttcctccctccttgtccaccccatagggtgtacccactggtcttggaagcacccatccttaatacgatgatttttctgtcgtgtgaaaatgaagccagcaggctgcccctagtcagtccttccttccagagaaaaagagatttgagaaagtgcctgggtaattcaccattaatttcctcccccaaactctctgagtcttcccttaatatttctggtggttctgaccaaagcaggtcatggtttgttgagcatttgggatcccagtgaagtagatgtttgtagccttgcatacttagcccttcccaggcacaaacggagtggcagagtggtgccaaccctgttttcccagtccacgtagacagattcacagtgcggaattctggaagctggagacagacgggctctttgcagagccgggactctgagagggacatgagggcctctgcctctgtgttcattctctgatgtcctgtacctgggctcagtgcccggtgggactcatctcctggccgcgcagcaaagccagcgggttcgtgctggtccttcctgcaccttaggctgggggtggggggcctgccggcgcattctccacgattgagcgcacaggcctgaagtctggacaacccgcagaaccgaagctccgagcagcgggtcggtggcgagtagtggggtcggtggcgagcagttggtggtgggccgcggccgccactacctcgaggacatttccctcccggagccagctctcctagaaaccccgcggcggccgccgcagccaagtgtttatggcccgcggtcgggtgggatcctagccctgtctcctctcctgggaaggagtgagggtgggacgtgacttagacacctacaaatctatttaccaaagaggagcccgggactgagggaaaaggccaaagagtgtgagtgcatgcggactgggggttcaggggaagaggacgaggaggaggaagatgaggtcgatttcctgatttaaaaaatcgtccaagccccgtggtccagcttaaggtcctcggttacatgcgccgctcagagcaggtcactttctgccttccacgtcctccttcaaggaagccccatgtgggtagctttcaatatcgcaggttcttactcctctgcctctataagctcaaacccaccaacgatcgggcaagtaaaccccctccctcgccgacttcggaactggcgagagttcagcgcagatgggcctgtggggagggggcaagatagatgagggggagcggcatggtgcggggtgaccccttggagagaggaaaaaggccacaagaggggctgccaccgccactaacggagatggccctggtagagacctttgggggtctggaacctctggactccccatgctctaactcccacactctgctatcagaaacttaaacttgaggattttctctgtttttcactcgcaataaattcagagcaaacaaaa

SEQ ID NO: 20 - DNA, 10917 bp, Homo sapiens
  source 1..10917: mol_type = genomic DNA
gcggcgcgggtcctccatatgctgagcgccggtcccctgggcccacttttctttctctatactttgtctctgttgtctttcttttctcaagtctctcgttccacctgaggagaaatgcccacagctgtggaggcgcaggccactccatctggtgcccaacgtggatgcttttctctagggtgaagggactctcgagtgtggtcattgaggacaagtcaacgagagattcccgagtacgtctacagtgagccttgtggtaagcttgggcgctcggaagaagccagggttaatggggcaaactaaaagtaaagtctctcattccacctgatgagaaacacccagaggtgtggaggggcaggccaccccttcagggtagggtcccctccatgcagaccatagagcacaggtgtgccccaaagaggagcagagagaaggagggagagggcccacgagagacttggaaatgaatggcaggattttaggcgctggacttgggttcggggcacctggcctttccttgtgtatttctcctactgtctgcctaactatttaatacaataaaagaaaaccagcccctggttcttgtggtgtttccaccctcccgggtccccgctggctgcctggcttcctcccgcagctcctgctgtgtgtgtatgtgtgtgtgtgtgcacatctgtggggcgtatgtgtgttcgtctttgtaattgaggctgcagagtggagagagcaggggttttctctggggacccagagagaaggaggcgttttcaccacagccgaacagggcaggaccccagcacccgggacccagcgggactttgccaaggggatggacctggctgggccacgcggctgtttgtgtagggaaaagaaagagagatcacactgttactgtgtctatgtagaaaaggaagacataaactccattttgagctgtactaagaaaaattattttgccttgacctgctgttaacctgtaactgtagccccaaccctgtgctcaaagaaacatgtgctgtatggaatcaaggtttaagggatcaagggctgtacaggatgtgccttgttaacaatgtgtttacaggcagtatgcttggtaaaagtcatcgccattctccattctccattaatcaggggcacgatgcactgcggaaagccacagggacctctgcccgagaaagcctgggtattgtccaaggcttccccccactgagacagcctgagatacggcctcgtgggaagggaaagacctgaccgtcccccagcccgacacccgtaaagggtctgtgctgaggaggattagtaaaaggggaaggcctcttgcagttgagataagaggaaggcctccgtctcctgcatgtccttgggaatggaatgtcttggtgtaaaacccgatagtacattccttctattctgagagaagaaaaccaccctgtggctggaggtgagatatgctagcggcaatgctgctctgttactctttgctacactgagatgtttgggtggagagaagcataaatctggcctatgtgcacatctgggcacagaacctccccttgaacttgtgacacagattcctttgttcacatgttttcctgctgaccttctccccactatcgccctgttctcccaccgcattccccttgctgagatagtgaaaatagtaatctgtagataccaagggaactcagagaccatggccggtgcacatcctccgtacgctgagcgctggtcccctgggcccattgttctttctctatactttgtctctgtgtcttatttctttcctcagtctctcatccctcctgacgagaaatacccacaggtgtggaggggctggcccccttcatctgatgcccaatgtgggtgcctttctctagggtgaaggtactctacagtgtggtcattgaggacaagttgacgagagagtcccaagtacgtccacggtcagccttgcggtaagcttgtgtgcttagaggaacccagggtaacgatggggcaaactgaaagtaaatatgcctcttatctcagctttattaaaattcttttaagaagagggggagttagagcttctacagaaaatctaattacgctatttcaaacaatagaacaattctgcccatggtttccagaacagggaactttagatctaaaagattgggaaaaaattggcaaagaattaaaacaagcaaatagggaaggtaaaatcatcccacttacagtatggaatgattgggccattattaaagcaactttagaaccatttcaaacaggagaagatattgtttcagtttctgatgcccctaaaagctgtgtaacagattgtgaagaagaggcagggacagaatcccagcaaggaacggaaagttcacattgtaaatatgtagcagagtctgtaatggctcagtcaacgcaaaatgttgactacagtcaattacaggagataatataccctgaatcatcaaaattgggggaaggaggtccagaatcattggggccatcagagcctaaaccacgatcgccatcaactcctcctcccgtggttcagatgcctgtaacattacaacctcaaacgcaggttagacaagcacaaaccccaagagaaaatcaagtagaaagggacagagtctctatcccggcaatgccaactcagatacagtatccacaatatcagccggtagaaaataagacccaaccgctggtagtttatcaataccggctgccaaccgagcttcagtatcggcctccttcagaggttcaatacagacctcaagcggtgtgtcctgtgccaaatagcacggcaccataccagcaacccacagcgatggcgtctaattcaccagcaacacaggacgcggcgctgtatcctcagccgcccactgtgagacttaatcctacagcatcacgtagtggacagggtggtgcactgcatgcagtcattgatgaagccagaaaacagggcgatcttgaggcatggcggttcctggtaattttacaactggtacaggccggggaagagactcaagtaggagcgcctgcccgagctgagactagatgtgaacctttcaccatgaaaatgttaaaagatataaaggaaggagttaaacaatatggatccaactccccttatataagaacattattagattccattgctcatggaaatagacttactccttatgactgggaaattttggccaaatcttccctttcatcctctcagtatctacagtttaaaacctggtggattgatggagtacaagaacaggtacgaaaaaatcaggctactaagcccactgttaatatagacgcagaccaattgttaggaacaggtccaaattggagcaccattaaccaacaatcagtgatgcagaatgaggctattgaacaagtaagggctatttgcctcagggcctggggaaaaattcaggacccaggaacagctttccctattaattcaattagacaaggctctaaagagccatatcctgactttgtggcaagattacaagatgctgctcaaaagtctattacagatgacaatgcccgaaaagttattgtagaattaatggcctatgaaaatgcaaatccagaatgtcagtcggccataaagccattaaaaggaaaagttccagcaggagttgatgtaattacagaatatgtgaaggcttgtgatgggattggaggagctatgcataaggcaatgctaatggctcaagcaatgagggggctcactctaggaggacaagttagaacatttgggaaaaaatgttataattgtggtcaaatcggtcatctgaaaaggagttgcccaggcttaaataaacagaatataataaatcaagctattaacagcaaaaaataaaaagccatctggcctgtgtccaaaatgtggaaaagcaaaacattgggccaatcaatgtcattctaaatttgataaagatgggcaaccattgtctggaaacaggaagaggggccagcctcaggccccccaacaaactggggcattcccagttaaactgtttgttcctcagggttttcaaggacaacaacccctacagaaaataccaccacttcagggagtcagccaattacaacaatccaacagctgtcccgcgccacagcaggcagcaccgcagtagatttatgttccacccaaatggtctttttactccctggaaagcccccacaaaagattcctagaggggtatatggcccgctgccagaagggagggtaggcctttgagggagatcaagtctaaatttgaagggagtccaaattcatactggggtaatttattcagattataaagggggaattcagttagtgatcagctccactgttccccggagtgccaatccaggtgatagaattgctcaattactgcttttgccttatgttaaaattggggaaaacaaaaaggaaagaacaggagggtttggaagtaccaaccctgcaggaaaagctgcttattgggctaatcaggtctcagaggatagacccgtgtgtacagtcactattcagggaaagagtttgaaggattagtggatacccaggctgatgtttctgtcatcggcataggtactgcctcagaagtgtatcaaagtgccatgattttacattgtccaggatctgataatcaagaaagtacggttcagcctgtgatcacttcattccaatcaatttatggggccgagacttgttacaacaatggcatgcagagattactatcccagcctccctatacagccccaggaataaaaaaatcatgactaaaatgggatagctccctaaaaagggactaggaaagaagtcccaattgaggctgaaaaaaatcaaaaaagaaaaggaatagggcatcctttttaggagcggtcactgtagagcctccaaaacccattccattaacttgggggaaaaaaaaacaactgtatggtaaatcagcagcgcttccaaaacaaaaactggaggctttacatttattagcaaagaaacaattagaaaaaggacattgagccttcattttcgccttggaattctgtttgtaattcagaaaaaatccggcagatggcgtataatgccgtaattcaacccatgggggctctcccaccccggttgccctctccagccatggtcccctttaattataattgatctgaaggattgcttttttaccattcctctggcaaaacaggattttgaaaaatttgcttttaccacaccagcctaaataataaagaaccagccaccaggtttcagtggaaagtattgcctcagggaatgcttaatagttcaactatttgtcagctcaagctctgcaaccagttagagacaagttttcagactgttacatcgttcactatgttgatattttgtgtgctgcagaaacgagagacaaattaattgaccgttacacatttctgcagacagaggttgccaacgcgggactgacaataacatctgataagattcaaacctctactcctttccgttacttgggaatgcaggtagaggaaaggaaaattaaaccacaaaaaatagaaataagaaaagacacattaaaagcattaaatgagtttcaaaagttgctaggagatactaattggatttggagatattaattggatttggccaactctaggcattcctacttatgccatgtcaaatttgttctctttcttaagaggggactcggaattaaatagtgaaagaacgttaactccagaggcaactaaagaaattaaattaattgaagaaaaaattcggtcagcacaagtaaatagaatagatcacttggccccactccaaattttgatttttgctactgcacattccctaacaggcatcattgttcaaaatacagatcttgtggagtggtccttccttcctcacagtacaattaagacttttacattgtacttggatcaaatggctacattaattggtcagggaagattatgaataataacattgtgtggaaatgacccagataaaatcactgttcctttcaacaagcaacaggttagacaagcctttatcaattctggtgcatggcagattggtcttgccgattttgtgggaattattgacaatcgttaccccaaaacaaaaatcttccagtttttaaaattgactacttggattttacctaaagttaccaaacataagcctttaaaaaatgctctggcagtgtttactgatggttccagcaatggaaaagtggcttacaccgggccaaaagaatgagtcatcaaaactcagtatcacttgactcaaagagcagagttggttgccgtcattacagtgttaacaagattttaatcagtctattaacattgtatcagattctgcatatgtagtacaggctacaaaggatattgagagagccctaatcaaatacattatggatgatcagttaaacccgctgtttaatttgttacaacaaaatgtaagaaaaagaaatttcccattttatattactcatattcgagcacacactaatttaccagggcctttaactaaagcaaatgaacaagctgacttgctagtatcatctgcattcatggaagcacaagaacttcatgccttgactcatgtaaatgcaataggattaaaaaataaatttgatatcacatggaaacagacaaaaaatattgtacaacattgcacccagtgtcagattctacacctggccactcaggaggcaagagttaatcccagaggtctatgtcctaatgtgttatggcaaatggatgtcatgcacgtaccttcatttggaaaattgtcatttgtccatgtgacagttgatacttattcacatttcatatgggcaacctgccagacaggagaaagtacttcccatgttaaaagacatttattatcttgttttcctgtcatgggagttccagaaaaagttaaaacagacaatgggccaggttactgtagtaaagcagttcaaaaattcttaaatcagtggaaaattacacatacaataggaattctctataattcccaaggacaggccataattgaaagaactaatagaacactcaaagctcaattggttaaacaaaaaaaaggaaaagacaggagtataacactccccagatgcaacttaatctagcactctatactttaaatgttttaaacatttatagaaatcagaccactacctctgcagaacaacatcttactggtaaaaggaacagcccacatgaaggaaaactgatttggtggaaagataataaaaataaaacatgggaaatggggaaggtgataacgtgggggagaggttttgcttgtgtttcaccaggagaaaatcagcttcctgtttggatacccactagacatttaaagttctacaatgaactcactggagatgcaaagaaaagtgtggagatggagacaccccaatcgactcgccaggtaaacaaaatggtgatatcagaagaacagaaaaagttgccttccatcaaggaagcagagttgccaatataggcacaattaaagaagctgacacagttagctaaaaaaaaaagcctagagaatacaaaggtgacaccaactccagagaatatgctgcttgcagctctgatgattgtatcaacggtggtaagtcttcccaagtctgcaggagcagctgcagctaattatacttactgggcctatgtgcctttcccacccttaattcgggcagttacatagatggataatcctattgaagtagatgttaataatagtgcatgggtgcctggccccacagatgactgttgccctgcccaacctgaagaaggaatgatgatgaatatttccattgggtatccttatcctcctgtttgcctagggaaggcaccaggatgcttaatgcctacaacccaaaattggttggtagaagtacctacagtcagtgctaccagtagatttacttatcacatggtaagtggaatgtcacagataaataatttacaggacccttcttatcaaagatcattacaatgtaggcctaaggggaaggcttgccccaaggaaattcccaaagaatcaaaaagcccagaagtcttagtctgcggagaatgtgtggctgatactgcagtgtagtacaaaacaatgaattttgaactatgatagactgggtcccttgaggccaattatatcataactgtacaggccagactcattcatgttcacaggccccatccatctggcccattaatccagcctatgacggtgatgtaactgaaaggctggaccaggtttatagaaggttagaatcactctgtccaaggaaatggggtgaaaagggaatttcatcaccttgaccaaagttagtcctgttactggtcctgaacatccagaattaggaagcttactgtggcctcacaccacattagaatttgttctggaaatcaagctataggaacaagagatcgtaagtcatattatactatcaacctaaattccagtctgacaattcctttgcaaaattgtgtaaaactcccttatattgctagttgtaggaaaaacatagttattaaacctgattcccaaaccataatctgtgaaaattgtggaatgtttacttgcattgatttgacttttaattggcagcaccgtattctactaggaagagcaagagagggtgtgtggatccttgtgtccatggaccgaccatgggaggcttcgctatccatccatattttaacggaagtattaaaaggaattctaactagatccaaaagattcatttttactttgatggcagtgattatgggcctcattgcagtcacagctactgctgcggctgctggaattgctttacactcctctgttcaaactgcagaatacgtaaatgattggcaaaagaattcctcaaaattgtggaattctcagatccaaatagatcaaaaattggcaaaccaaattaatgatcttagacaaactgtcatttggatgggagaggctcatgagcttggaatatctttttcagttacgatgtgactggaatacatcagatttttgtgttacaccacaagcctataatgagtctgagcatcactgggacatggttagatgccatctgcaaggaggagaagataatcttactttagacatttcaaaattaaaagaattttttttttctttgagacagagtctcgctctgtcgcccaggctggagtgcagtggcgtgatctcagctcactgcaagttccgcctcctgggtttacaccattctcctgcctcagcctcccaagtagttgggactacaggagcccaccaccatgcctggctaattttttttgggtttttaatagagatggagtttcaccgtgttagccaggatggtctcgatctcctgaccttgtgatctgcccaccttggcctcccaaagtgctgggattacagtcgtgagccaccgtgcccagccaagaaaaaatttttgaggcatcaaaagcccatttaaatttggtgccaggaacggagacaatcgtgaaagctgctgatagcctcacaaatcttaagccagtcacttgggttaaaagcatcagaagtttcactattgtaaatttcatattaatccttgtatgcctgttctgtctgttgttagtctacaggtgtatccagcagctccaaagagacagcaaccagcaagaatgggccatagtgacgatggtggttttgtcaaaaagaaaagggggggatatgtaaggaaaagagagatcagactttcactgtgtctatgtagaaaaggaagacataagaaactccattttgatctgtactaagaaaaattgttttgccttgagatgctgttaatctgtaactttagccccaaccctgtgctcacggaaacatgtgctgtaaggtttaagggatctagggctgtgcaggatgtaccttgttaacaatatgtttgcaggcagtatgtttggtaaaagtcatcgccattctccattctcgattaaccaggggctcaatgcactgtggaaagccacaggaacctctgcccaagaaagcctggctgttgtgggaagtcagggaccccgaatggagggaccagctggtgctgcatcaggaaacataaattgtgaagatttcttggacatttatcagtttccaaaattaatacttttataatttcttacacctgtcttactttaatctcttaatcctgttatctttgtaagctgaggatatacgtcacctcaggaccactattgtacaaattgattgtaaaacatgttcacatgtgtttgaacaatatgaaatcagtgcaccttgaaaatgaacagaataacagtgattttagggaacaaaggaagacaaccataaggtctgactgcctgaggggtcgggcaaaaagccatatttttcttcttgcagagagcctataaatggacgtgcaagtaggagagatattgctaaattcttttcctagcaaggaatataatactaagaccctagggaaagaattgcattcctggggggaggtctataaacggccgctctgggagtgtctgtcctatgtggttgagataaggactgagatacgccctggtctcctgcagtaccctcaggcttactaggattgggaaaccccagtcctggtaaatttgaggtcaggccggttctttgctctgaaccctgttttctgttaagatgtttatcaagacaatacatgcaccgctgaacatagacccttatcaggagtttctgattttgctctggtcctgtttcttcagaagcatgtcatctttgctctgccttctgccctttgaagcatgtgatctttgtgacctactccctgttcatacacccctccccttttaaaatccctaataaaaacttgctggttttgtggctcaggggggcatcatggacctaccaatacgtgatgtcacccccggtggcccagctgt

SEQ ID NO: 21 - DNA, 2312 bp, Homo sapiens
  source 1..2312: mol_type = genomic DNA
gggtctcacagaatgaggctttgaagcctgtcctcctaactcttggcctgctgctctttctttgtaactgtcagtgaggtagttattataattaagctataattgccatgcctacctttaagctccattcatcagaaccctaagcctttaggactatcagcacattcaaaaaatgtctgtcatcactgttgctttggtcaatgtgcagtgaggccacctgggtgtctaactggtattgtattgtccttgtctccctcacctcttcacccccccccatcatcatggggcatctgactgcagcaatacttcatcctgctgatcctgacagatggtgttatcacagacatggccgacacccgggaggccattgtccatgcctcccacctccccatgtcagtcatcatcgtgggagtagggaacgctgacttcagtgacatgcagatgctggacggtgatgatgggattctgaggtcacccaagggagagcctgttcttcgagacatcgtccagttcgtgcccttcaggaacttcaaacacgcatctccagctgccctggcaaagagcgtgctggctgaagtcccaaaccaagttgtggactattacaatggcaaaggaattaaaccaaaatgttcatcagaaatgtatgaatcttccagaacactagcaccatgaactccccacacagttttacagagttctgaaatactattcctgctaatatttcatatttaatacttctactactcctgtactttaaaaaaccaacaacatatacacatttaaaaatagcacgttttggtgatttttaactatctgacaattttttttgcatgtgtagccctgaggcctggatctgttaagcccttgtattgttaactttttacaaagaaacacagataacaataacttactatttacattacagcatgtcgccttgaaataaaatggtatctgtatccattttttatacaggtttgttgaaattttgctaaatttcttatctttacactctaaagcattttgaaacatttactgaatgttgatagacgaaatatacttggttttatctgctataggatgagagactttttaaaatggcagatgcatggactgtattttgcatgtttaaaataaaaaaagaaaaacccacatggtttttgcagttgttatctctaattcctccctgctgagaatggtctctctactaaagaagaggtttatttacttcttctttctgaggtgagtctttttgaggtaagtctgggtcatctagcccagcacctctcatactttatactgtgtacacaaatcacctgagagtcttattaaaattcagattgtgatacataggtctgtgtgggacccaagattctgcatctttaactaggtcccaggtgatgctaatgcagtccctggactataccaagaggagtgaggatctagactttagggtgtcatgatggagaccatcaaaaacagcgtggcttctagtctgcttgagaatggcacctcttcctgacagtagcacaaaagtcctgcctgtctccagaggtgacagtagaaagtaatgagactgactccagaagctgcacacctcaaatcagtctcgctgctttatactcacacctcttccttagataagactagaaagtgctcctcctggccagtccctgccctcttaaaagtggcatcacacaccactgcatggatggtgtcaatccctagaagtgatctcaaagcgtcttcactggaaccacaacaatagaaacttacacatggcaaatggctatgcagtacagctcccgatatctggtccactaaattgacctttgagcttagtgtgggaatttcttgcctcctttctatcacttctgagaacaaattctataagcagaaatgcctggaattattgtctggggtcgaggtgttttgtttcaatataagctggccagtctggaaccaaaaggacgaatgtttaacttgtataatcttcttgcagggaaacaggcaagtgtttttgcaagcataaaaggcacaaagtggagtttatttttggtcagagagatgaagaagtaaatcacaaggcaaaatttgttgtttgtttgaagaggggagcagtattaacaagcaaataaaatgccttctatgatttccacagttacaattatagatcctaatcttgcaaatacatgtcaccaaatgcacaacattttgggaatgatggtaaaattgtatgactgaaaaaatcataaatatttaagctatattgttttattaataaattgggtacttacagaattcttctaagagtt

SEQ ID NO: 22 - DNA, 3562 bp, Homo sapiens
  source 1..3562: mol_type = genomic DNA
ggcttcattccaggatttcacttgtcacactgatgggtgagatgcctttcatattggcataagacactgagcggatgcctcctcttatcttatcaaacagaaacccggcgagtgaatctacccagagctgaagcttcctttgcaacttgggaacaccagggccacagtgactttgtggcttggctttagataaatttgaccatggctgtagaacccagcagctcagaatccattaaaaggagagctgggaggagaatgaagaagatgagcaacatttatgagtccgctgccaacacactgggaatctttaacagcccctgcctgaccaaagttgagctgcgtgtggcgtgcaaaggcatttctgacagagatgccctttccaaaccagacccctgtgtcatcctcaagatgcagtctcatgggcagtggtttgaggttgacaggactgaggtgattcgcacctgcataaacccagtgtactcaaaactgtttactgtggacttttactttgaggaggtgcagcgcctgcggtttgaagtccatgacatcagcagcaaccacaatgggctgaaggaggccgacttccttggtggcatggagtgcacacttggccagattgtttcccagagaaagctgtccaaatccttgctgaagcatgggaacacagcagggaaatcttccatcacggtgattgctgaagaattatctggcaatgacgactatgttgagcttgcattcaatgcacggaaattggatgacaaggatttcttcagtaaatctgacccatttctggaaatttttcgtatgaatgatgatgcaactcagcagctggtgcaccgaactgaggttgtgatgaataacttaagcccagcctggaaatcattcaaagtatctgtaaattctctatgcagcggagacccagaccgccggctaaagtgcatagtatgggactgggactccaatggcaagcatgacttcattggagaattcacctcgacattcaaggagatgagaggagcaatggaagggaaacaggtgcagtgggagtgcatcaatcccaagtacaaagccaagaagaagaattacaagaactcaggcactgtgattctgaatctgtgcaagattcacaagatgcattctttcttggactacatcatgggtggctgccaaatccagtttacagtagctatagatttcactgcctcaaacggggaccccaggaacagctgttccttgcactacatccacccttaccaacccaatgagtatctgaaagctttggtagctgtgggggagatttgccaagactatgacagtgacaaaatgttccctgcctttgggtttggcgccaggatacctccagagtacacggtctctcatgactttgcaatcaactttaatgaagacaacccagaatgtgcaggaattcaaggagttgtggaagcctatcagagctgtcttcctaagctccaactctacggtcccaccaacattgcccccatcatccagaaggttgccaagtcagcgtcagaggaaactaacaccaaggaggcatcgcaatacttcatcctgctgatcctgacagatggtgttatcacagacatggccgacacccgggaggccattgtccatgcctcccacctccccatgtcagtcatcatcgtgggagtagggaacgctgacttcagtgacatgcagatgctggacggtgatgatgggattctgaggtcacccaagggagagcctgttcttcgagacatcgtccagttcgtgcccttcaggaacttcaaacacgcatctccagctgccctggcaaagagcgtgctggctgaagtcccaaaccaagttgtggactattacaatggcaaaggaattaaaccaaaatgttcatcagaaatgtatgaatcttccagaacactagcaccatgaactccccacacagttttacagagttctgaaatactattcctgctaatatttcatatttaatacttctactactcctgtactttaaaaaaccaacaacatatacacatttaaaaatagcacgttttggtgatttttaactatctgacaattttttttgcatgtgtagccctgaggcctggatctgttaagcccttgtattgttaactttttacaaagaaacacagataacaataacttactatttacattacagcatgtcgccttgaaataaaatggtatctgtatccattttttatacaggtttgttgaaattttgctaaatttcttatctttacactctaaagcattttgaaacatttactgaatgttgatagacgaaatatacttggttttatctgctataggatgagagactttttaaaatggcagatgcatggactgtattttgcatgtttaaaataaaaaaagaaaaacccacatggtttttgcagttgttatctctaattcctccctgctgagaatggtctctctactaaagaagaggtttatttacttcttctttctgaggtgagtctttttgaggtaagtctgggtcatctagcccagcacctctcatactttatactgtgtacacaaatcacctgagagtcttattaaaattcagattgtgatacataggtctgtgtgggacccaagattctgcatctttaactaggtcccaggtgatgctaatgcagtccctggactataccaagaggagtgaggatctagactttagggtgtcatgatggagaccatcaaaaacagcgtggcttctagtctgcttgagaatggcacctcttcctgacagtagcacaaaagtcctgcctgtctccagaggtgacagtagaaagtaatgagactgactccagaagctgcacacctcaaatcagtctcgctgctttatactcacacctcttccttagataagactagaaagtgctcctcctggccagtccctgccctcttaaaagtggcatcacacaccactgcatggatggtgtcaatccctagaagtgatctcaaagcgtcttcactggaaccacaacaatagaaacttacacatggcaaatggctatgcagtacagctcccgatatctggtccactaaattgacctttgagcttagtgtgggaatttcttgcctcctttctatcacttctgagaacaaattctataagcagaaatgcctggaattattgtctggggtcgaggtgttttgtttcaatataagctggccagtctggaaccaaaaggacgaatgtttaacttgtataatcttcttgcagggaaacaggcaagtgtttttgcaagcataaaaggcacaaagtggagtttatttttggtcagagagatgaagaagtaaatcacaaggcaaaatttgttgtttgtttgaagaggggagcagtattaacaagcaaataaaatgccttctatgatttccacagttacaattatagatcctaatcttgcaaatacatgtcaccaaatgcacaacattttgggaatgatggtaaaattgtatgactgaaaaaatcataaatatttaagctatattgttttattaataaattgggtacttacagaattcttct

SEQ ID NO: 23 - DNA, 5431 bp, Homo sapiens
  source 1..5431: mol_type = genomic DNA
acaccagcggctggacattgagaggatcacagcagtggaaaaagacacaagcacctagccgttgagaggaacgcactggcctaagaacatactgacagacgccggtaggccagcagggcggcaggccatcaacccgcggaaggacacggactttggccagggcggtataaggagcctaaaggacgtcatacccatgggccagacctaacattcctttctgctgatcccaagtttttagacaaagtttcccttccttaaccaattgcgaatcagaaaatcctcgaatccaccaatgacctataccagtaaagatgtcatctggccaatttgtgtgaaaaaagagaataattctcatccaaaccgcctgtctctggaaataagaaaagctctgagggtctccaaagttaccagaggaaggctgaattttatggtgattgataatatttccaagcttatggagaaaaaaatatcattagtcttttccatggtagaaaagagtaaagcctgtaacaaaaaaagtgatacagtggatgggatgatgagacccttgaaataagcaaggatggaccagaaactggtaacactcacccatggaatttcattatgaagtcgtggcaagggccaagccgacctggatttgaaacccatctcttcaacgatgtagattttgacaacatatttgatttctctgggcctcagtttgttatctgcacaaaagggagatatgagtggttacgttattggattgtcatgaacattaaataggataatgtcaaatcattcagccaagtttctagcatatagtacaggttcaaatattatcttttttttcccaccaacctcttttccaggaaaatgcaaagctactctttagccaaattttaaaacaggggatatttattttgggaatcattaatacccatctgccccttttttggtccattggacatattgaaatgaatgattaatacttatcacttcatggtgtacacattgttttgtttcttatatccagagtctagtcctcaactctaaccaaagtaaaggaaactggaaagacacacgctttttcagtcattaatagaaagttgtccagaaacccggcgagtgaatctacccagagctgaagcttcctttgcaacttgggaacaccagggccacagtgactttgtggcttggctttagataaatttgaccatggctgtagaacccagcagctcagaatccattaaaaggagagctgggaggaggctcctgccatacgccagacagttttgtagacacgaaggatccagagattagcaacacctttaccatttttggtgacagttaagcacccatctaagaagttttctttggtgagtgccaaaaagtgtaactcccattccccccacacccgcgccgcgatacgaccgctccaccctagagtggagatggagaccaagcacttggagatctaaatcaagtgtccccaggagctcagttgagcgacaaagctgagcagaaagcccagactgcgggcgcggcaggaccacggagagcgccgccgccaaggcctgggcggggcctgagctcgggttcccggggcaatgctcgtctccgtcagcaacccccagggggcgctcgcgcggaggtttcggaaccagtctcttgccgggttgctgggtgcatgggattcgtcagaaggtggaaatctctctgtgagaagctgccatctccccgccacccgctcgtccccttctctttctgccaccctcctttccttcctccctcgctccactccactccctccctcttttctcagtaccctcctctttactctccgagttaactgagagccgacctgacatctccaacattttcaccctcttcccccacccccatcaccgagaatggagtcagggtttccggagagaccgaactctgctctcagcacctttcccagccgctgttgctaaactgacctcggaggacgagaggggaaggaggtgcgacgccccttacatcagtacaaaactaccacaccaaccacctccacttcaaagccggattttgcatcctgggggcgggacagacctcgtcccgggctgaattctctctccactcttcgagattggcacacccagaatgaagaagatgagcaacatttatgagtccgctgccaacacactgggaatctttaacagcccctgcctgaccaaagttgagctgcgtgtggcgtgcaaaggcatttctgacagagatgccctttccaaaccagacccctgtgtcatcctcaagatgcagtctcatgggcagtggtttgaggttgacaggactgaggtgattcgcacctgcataaacccagtgtactcaaaactgtttactgtggacttttactttgaggaggtgcagcgcctgcggtttgaagtccatgacatcagcagcaaccacaatgggctgaaggaggccgacttccttggtggcatggagtgcacacttggccagattgtttcccagagaaagctgtccaaatccttgctgaagcatgggaacacagcagggaaatcttccatcacggtgattgctgaagaattatctggcaatgacgactatgttgagcttgcattcaatgcacggaaattggatgacaaggatttcttcagtaaatctgacccatttctggaaatttttcgtatgaatgatgatgcaactcagcagctggtgcaccgaactgaggttgtgatgaataacttaagcccagcctggaaatcattcaaagtatctgtaaattctctatgcagcggagacccagaccgccggctaaagtgcatagtatgggactgggactccaatggcaagcatgacttcattggagaattcacctcgacattcaaggagatgagaggagcaatggaagggaaacaggtgcagtgggagtgcatcaatcccaagtacaaagccaagaagaagaattacaagaactcaggcactgtgattctgaatctgtgcaagattcacaagatgcattctttcttggactacatcatgggtggctgccaaatccagtttacagtagctatagatttcactgcctcaaacggggaccccaggaacagctgttccttgcactacatccacccttaccaacccaatgagtatctgaaagctttggtagctgtgggggagatttgccaagactatgacagtgacaaaatgttccctgcctttgggtttggcgccaggatacctccagagtacacggtctctcatgactttgcaatcaactttaatgaagacaacccagaatgtgcaggaattcaaggagttgtggaagcctatcagagctgtcttcctaagctccaactctacggtcccaccaacattgcccccatcatccagaaggttgccaagtcagcgtcagaggaaactaacaccaaggaggcatcgcaatacttcatcctgctgatcctgacagatggtgttatcacagacatggccgacacccgggaggccattgtccatgcctcccacctccccatgtcagtcatcatcgtgggagtagggaacgctgacttcagtgacatgcagatgctggacggtgatgatgggattctgaggtcacccaagggagagcctgttcttcgagacatcgtccagttcgtgcccttcaggaacttcaaacacgcatctccagctgccctggcaaagagcgtgctggctgaagtcccaaaccaagttgtggactattacaatggcaaaggaattaaaccaaaatgttcatcagaaatgtatgaatcttccagaacactagcaccatgaactccccacacagttttacagagttctgaaatactattcctgctaatatttcatatttaatacttctactactcctgtactttaaaaaaccaacaacatatacacatttaaaaatagcacgttttggtgatttttaactatctgacaattttttttgcatgtgtagccctgaggcctggatctgttaagcccttgtattgttaactttttacaaagaaacacagataacaataacttactatttacattacagcatgtcgccttgaaataaaatggtatctgtatccattttttatacaggtttgttgaaattttgctaaatttcttatctttacactctaaagcattttgaaacatttactgaatgttgatagacgaaatatacttggttttatctgctataggatgagagactttttaaaatggcagatgcatggactgtattttgcatgtttaaaataaaaaaagaaaaacccacatggtttttgcagttgttatctctaattcctccctgctgagaatggtctctctactaaagaagaggtttatttacttcttctttctgaggtgagtctttttgaggtaagtctgggtcatctagcccagcacctctcatactttatactgtgtacacaaatcacctgagagtcttattaaaattcagattgtgatacataggtctgtgtgggacccaagattctgcatctttaactaggtcccaggtgatgctaatgcagtccctggactataccaagaggagtgaggatctagactttagggtgtcatgatggagaccatcaaaaacagcgtggcttctagtctgcttgagaatggcacctcttcctgacagtagcacaaaagtcctgcctgtctccagaggtgacagtagaaagtaatgagactgactccagaagctgcacacctcaaatcagtctcgctgctttatactcacacctcttccttagataagactagaaagtgctcctcctggccagtccctgccctcttaaaagtggcatcacacaccactgcatggatggtgtcaatccctagaagtgatctcaaagcgtcttcactggaaccacaacaatagaaacttacacatggcaaatggctatgcagtacagctcccgatatctggtccactaaattgacctttgagcttagtgtgggaatttcttgcctcctttctatcacttctgagaacaaattctataagcagaaatgcctggaattattgtctggggtcgaggtgttttgtttcaatataagctggccagtctggaaccaaaaggacgaatgtttaacttgtataatcttcttgcagggaaacaggcaagtgtttttgcaagcataaaaggcacaaagtggagtttatttttggtcagagagatgaagaagtaaatcacaaggcaaaatttgttgtttgtttgaagaggggagcagtattaacaagcaaataaaatgccttctatgatttccacagttacaattatagatcctaatcttgcaaatacatgtcaccaaatgcacaacattttgggaatgatggtaaaattgtatgactgaaaaaatcataaatatttaagctatattgttttattaataaattgggtacttacagaattct

SEQ ID NO: 24 - DNA, 3749 bp, Homo sapiens
  source 1..3749: mol_type = genomic DNA
gtcagaaggtggaaatctctctgtgagaagctgccatctccccgccacccgctcgtccccttctctttctgccaccctcctttccttcctccctcgctccactccactccctccctcttttctcagtaccctcctctttactctccgagttaactgagagccgacctgacatctccaacattttcaccctcttcccccacccccatcaccgagaatggagtcagggtttccggagagaccgaactctgctctcagcacctttcccagccgctgttgctaaactgacctcggaggacgagaggggaaggaggtgcgacgccccttacatcagtacaaaactaccacaccaaccacctccacttcaaagccggattttgcatcctgggggcgggacagacctcgtcccgggctgaattctctctccactcttcgagattggcacacccagaatgaagaagatgagcaacatttatgagtccgctgccaacacactgggaatctttaacagcccctgcctgaccaaagttgagctgcgtgtggcgtgcaaaggcatttctgacagagatgccctttccaaaccagacccctgtgtcatcctcaagatgcagtctcatgggcagtggtttgaggttgacaggactgaggtgattcgcacctgcataaacccagtgtactcaaaactgtttactgtggacttttactttgaggaggtgcagcgcctgcggtttgaagtccatgacatcagcagcaaccacaatgggctgaaggaggccgacttccttggtggcatggagtgcacacttggccagattgtttcccagagaaagctgtccaaatccttgctgaagcatgggaacacagcagggaaatcttccatcacggtgattgctgaagaattatctggcaatgacgactatgttgagcttgcattcaatgcacggaaattggatgacaaggatttcttcagtaaatctgacccatttctggaaatttttcgtatgaatgatgatgcaactcagcagctggtgcaccgaactgaggttgtgatgaataacttaagcccagcctggaaatcattcaaagtatctgtaaattctctatgcagcggagacccagaccgccggctaaagtgcatagtatgggactgggactccaatggcaagcatgacttcattggagaattcacctcgacattcaaggagatgagaggagcaatggaagggaaacaggtgcagtgggagtgcatcaatcccaagtacaaagccaagaagaagaattacaagaactcaggcactgtgattctgaatctgtgcaagattcacaagatgcattctttcttggactacatcatgggtggctgccaaatccagtttacagtagctatagatttcactgcctcaaacggggaccccaggaacagctgttccttgcactacatccacccttaccaacccaatgagtatctgaaagctttggtagctgtgggggagatttgccaagactatgacagtgacaaaatgttccctgcctttgggtttggcgccaggatacctccagagtacacggtctctcatgactttgcaatcaactttaatgaagacaacccagaatgtgcaggaattcaaggagttgtggaagcctatcagagctgtcttcctaagctccaactctacggtcccaccaacattgcccccatcatccagaaggttgccaagtcagcgtcagaggaaactaacaccaaggaggcatcgcaatacttcatcctgctgatcctgacagatggtgttatcacagacatggccgacacccgggaggccattgtccatgcctcccacctccccatgtcagtcatcatcgtgggagtagggaacgctgacttcagtgacatgcagatgctggacggtgatgatgggattctgaggtcacccaagggagagcctgttcttcgagacatcgtccagttcgtgcccttcaggaacttcaaacacgcatctccagctgccctggcaaagagcgtgctggctgaagtcccaaaccaagttgtggactattacaatggcaaaggaattaaaccaaaatgttcatcagaaatgtatgaatcttccagaacactagcaccatgaactccccacacagttttacagagttctgaaatactattcctgctaatatttcatatttaatacttctactactcctgtactttaaaaaaccaacaacatatacacatttaaaaatagcacgttttggtgatttttaactatctgacaattttttttgcatgtgtagccctgaggcctggatctgttaagcccttgtattgttaactttttacaaagaaacacagataacaataacttactatttacattacagcatgtcgccttgaaataaaatggtatctgtatccattttttatacaggtttgttgaaattttgctaaatttcttatctttacactctaaagcattttgaaacatttactgaatgttgatagacgaaatatacttggttttatctgctataggatgagagactttttaaaatggcagatgcatggactgtattttgcatgtttaaaataaaaaaagaaaaacccacatggtttttgcagttgttatctctaattcctccctgctgagaatggtctctctactaaagaagaggtttatttacttcttctttctgaggtgagtctttttgaggtaagtctgggtcatctagcccagcacctctcatactttatactgtgtacacaaatcacctgagagtcttattaaaattcagattgtgatacataggtctgtgtgggacccaagattctgcatctttaactaggtcccaggtgatgctaatgcagtccctggactataccaagaggagtgaggatctagactttagggtgtcatgatggagaccatcaaaaacagcgtggcttctagtctgcttgagaatggcacctcttcctgacagtagcacaaaagtcctgcctgtctccagaggtgacagtagaaagtaatgagactgactccagaagctgcacacctcaaatcagtctcgctgctttatactcacacctcttccttagataagactagaaagtgctcctcctggccagtccctgccctcttaaaagtggcatcacacaccactgcatggatggtgtcaatccctagaagtgatctcaaagcgtcttcactggaaccacaacaatagaaacttacacatggcaaatggctatgcagtacagctcccgatatctggtccactaaattgacctttgagcttagtgtgggaatttcttgcctcctttctatcacttctgagaacaaattctataagcagaaatgcctggaattattgtctggggtcgaggtgttttgtttcaatataagctggccagtctggaaccaaaaggacgaatgtttaacttgtataatcttcttgcagggaaacaggcaagtgtttttgcaagcataaaaggcacaaagtggagtttatttttggtcagagagatgaagaagtaaatcacaaggcaaaatttgttgtttgtttgaagaggggagcagtattaacaagcaaataaaatgccttctatgatttccacagttacaattatagatcctaatcttgcaaatacatgtcaccaaatgcacaacattttgggaatgatggtaaaattgtatgactgaaaaaatcataaatatttaagctatattgttttattaataaattgggtacttacagaa

SEQ ID NO: 25 - DNA, 1958 bp, Homo sapiens
  source 1..1958: mol_type = genomic DNA
ttgcaggttgacaggactgaggtgattcgcacctgcataaacccagtgtactcaaaactgtttactgtggacttttactttgaggaggtgcagcgcctgcggtttgaagtccatgacatcagcagcaaccacaatgggctgaaggaggccgacttccttggtggcatggagtgcacacttggccagattgtttcccagagaaagctgtccaaatccttgctgaagcatgggaacacagcagggaaatcttccatcacggtgattgctgaagaattatctggcaatgacgactatgttgagcttgcattcaatgcacggaaattggatgacaaggatttcttcagtaaatctgacccatttctggaaatttttcgtatgaatgatgatgcaactcagcagctggtgcaccgaactgaggttgtgatgaataacttaagcccagcctggaaatcattcaaagtatctgtaaattctctatgcagcggagacccagaccgccggctaaagtgcatagtatgggactgggactccaatggcaagcatgacttcattggagaattcacctcgacattcaaggagatgagaggagcaatggaagggaaacaggtgcagtgggagtgcatcaatcccaagtacaaagccaagaagaagaattacaagaactcaggcactgtgattctgaatctgtgcaagattcacaagatgcattctttcttggactacatcatgggtggctgccaaatccagtttacagtagctatagatttcactgcctcaaacggggaccccaggaacagctgttccttgcactacatccacccttaccaacccaatgagtatctgaaagctttggtagctgtgggggagatttgccaagactatgacagtgacaaaatgttccctgcctttgggtttggcgccaggatacctccagagtacacggtctctcatgactttgcaatcaactttaatgaagacaacccagaatgtgcaggaattcaaggagttgtggaagcctatcagagctgtcttcctaagctccaactctacggtcccaccaacattgcccccatcatccagaaggttgccaagtcagcgtcagaggaaactaacaccaaggaggcatcgcaatacttcatcctgctgatcctgacagatggtgttatcacagacatggccgacacccgggaggccattgtccatgcctcccacctccccatgtcagtcatcatcgtgggagtagggaacgctgacttcagtgacatgcagatgctggacggtgatgatgggattctgaggtcacccaagggagagcctgttcttcgagacatcgtccagttcgtgcccttcaggaacttcaaacacgcatctccagctgccctggcaaagagcgtgctggctgaagtcccaaaccaagttgtggactattacaatggcaaaggaattaaaccaaaatgttcatcagaaatgtatgaatcttccagaacactagcaccatgaactccccacacagttttacagagttctgaaatactattcctgctaatatttcatatttaatacttctactactcctgtactttaaaaaaccaacaacatatacacatttaaaaatagcacgttttggtgatttttaactatctgacaattttttttgcatgtgtagccctgaggcctggatctgttaagcccttgtattgttaactttttacaaagaaacacagataacaataacttactatttacattacagcatgtcgccttgaaataaaatggtatctgtatccattttttatacaggtttgttgaaattttgctaaatttcttatctttacactctaaagcattttgaaacatttactgaatgttgatagacgaaatatacttggttttatctgctataggatgagagactttttaaaatggcagatgcatggactgtattttgcatgtttaaa

SEQ ID NO: 26 - DNA, 700 bp, Homo sapiens
  source 1..700: mol_type = genomic DNA
agaacagaagtgtatttggctcatggttttggagtctgggaagtccaagagcatagcaccagcacctacaagggtcatctcatggcagaagtatggaaggcacaagcaaacatgcatctccagctgccctggcaaagagcgtgctggctgaagtcccaaaccaagttgtggactattacaatggcaaaggaattaaaccaaaatgttcatcagaaatgtatgaatcttccagaacactagcaccatgaactccccacacagttttacagagttctgaaatactattcctgctaatatttcatatttaatacttctactactcctgtactttaaaaaaccaacaacatatacacatttaaaaatagcacgttttggtgatttttaactatctgacaattttttttgcatgtgtagccctgaggcctggatctgttaagcccttgtattgttaactttttacaaagaaacacagataacaataacttactatttacattacagcatgtcgccttgaaataaaatggtatctgtatccattttttatacaggtttgttgaaattttgctaaatttcttatctttacactctaaagcattttgaaacatttactgaatgttgatagacgaaatatacttggttttatctgctataggatgagagactttttaaaatggcagatgcatggactgtattttgcatg

SEQ ID NO: 27 - DNA, 2230 bp, Homo sapiens
  source 1..2230: mol_type = genomic DNA
gagtctagtcctcaactctaaccaaagtaaaggaaactggaaagacacacgctttttcagtcattaatagaaagttgtccagaaacccggcgagtgaatctacccagagctgaagcttcctttgcaacttgggaacaccagggccacagtgactttgtggcttggctttagataaatttgaccatggctgtagaacccagcagctcagaatccattaaaaggagagctgggaggagaatgaagaagatgagcaacatttatgagtccgctgccaacacactgggaatctttaacagcccctgcctgaccaaagttgagctgcgtgtggcgtgcaaaggcatttctgacagagatgccctttccaaaccagacccctgtgtcatcctcaagatgcagtctcatgggcagtggtttgaggttgacaggactgaggtgattcgcacctgcataaacccagtgtactcaaaactgtttactgtggacttttactttgaggaggtgcagcgcctgcggtttgaagtccatgacatcagcagcaaccacaatgggctgaaggaggccgacttccttggtggcatggagtgcacacttggccagattgtttcccagagaaagctgtccaaatccttgctgaagcatgggaacacagcagggaaatcttccatcacggtgattgctgaagaattatctggcaatgacgactatgttgagcttgcattcaatgcacggaaattggatgacaaggatttcttcagtaaatctgacccatttctggaaatttttcgtatgaatgatgatgcaactcagcagctggtgcaccgaactgaggttgtgatgaataacttaagcccagcctggaaatcattcaaagtatctgtaaattctctatgcagcggagacccagaccgccggctaaagtgcatagtatgggactgggactccaatggcaagcatgacttcattggagaattcacctcgacattcaaggagatgagaggagcaatggaagggaaacaggtgcagtgggagtgcatcaatcccaagtacaaagccaagaagaagaattacaagaactcaggcactgtgattctgaatctgtgcaagattcacaagatgcattctttcttggactacatcatgggtggctgccaaatccagtttacagtagctatagatttcactgcctcaaacggggaccccaggaacagctgttccttgcactacatccacccttaccaacccaatgagtatctgaaagctttggtagctgtgggggagatttgccaagactatgacagtgacaaaatgttccctgcctttgggtttggcgccaggatacctccagagtacacggtctctcatgactttgcaatcaactttaatgaagacaacccagaatgtgcaggaattcaaggagttgtggaagcctatcagagctgtcttcctaagctccaactctacggtcccaccaacattgcccccatcatccagaaggttgccaagtcagcgtcagaggaaactaacaccaaggaggcatcgcaatacttcatcctgctgatcctgacagatggtgttatcacagacatggccgacacccgggaggccattgtccatgcctcccacctccccatgtcagtcatcatcgtgggagtagggaacgctgacttcagtgacatgcagatgctggacggtgatgatgggattctgaggtcacccaagggagagcctgttcttcgagacatcgtccagttcgtgcccttcaggaacttcaaacacgcatctccagctgccctggcaaagagcgtgctggctgaagtcccaaaccaagttgtggactattacaatggcaaaggaattaaaccaaaatgttcatcagaaatgtatgaatcttccagaacactagcaccatgaactccccacacagttttacagagttctgaaatactattcctgctaatatttcatatttaatacttctactactcctgtactttaaaaaaccaacaacatatacacatttaaaaatagcacgttttggtgatttttaactatctgacaattttttttgcatgtgtagccctgaggcctggatctgttaagcccttgtattgttaactttttacaaagaaacacagataacaataacttactatttacattacagcatgtcgccttgaaataaaatggtatctgtatccattttttatacaggtttgttgaaattttgcta

SEQ ID NO: 28 - DNA, 2503 bp, Homo sapiens
  source 1..2503: mol_type = genomic DNA
gagtctagtcctcaactctaaccaaagtaaaggaaactggaaagacacacgctttttcagtcattaatagaaagttgtccagaaacccggcgagtgaatctacccagagctgaagcttcctttgcaacttgggaacaccagggccacagtgactttgtggcttggctttagataaatttgaccatggctgtagaacccagcagctcagaatccattaaaaggagagctgggaggaggctcctgccatacgccagacagttttgtagacacgaaggatccagagattagcaacacctttaccatttttggtgacagttaagcacccatctaagaagttttctttgggagtcagggtttccggagagaccgaactctgctctcagcacctttcccagccgctgttgctaaactgacctcggaggacgagaggggaaggaggtgcgacgccccttacatcagtacaaaactaccacaccaaccacctccacttcaaagccggattttgcatcctgggggcgggacagacctcgtcccgggctgaattctctctccactcttcgagattggcacacccagaatgaagaagatgagcaacatttatgagtccgctgccaacacactgggaatctttaacagcccctgcctgaccaaagttgagctgcgtgtggcgtgcaaaggcatttctgacagagatgccctttccaaaccagacccctgtgtcatcctcaagatgcagtctcatgggcagtggtttgaggttgacaggactgaggtgattcgcacctgcataaacccagtgtactcaaaactgtttactgtggacttttactttgaggaggtgcagcgcctgcggtttgaagtccatgacatcagcagcaaccacaatgggctgaaggaggccgacttccttggtggcatggagtgcacacttggccagattgtttcccagagaaagctgtccaaatccttgctgaagcatgggaacacagcagggaaatcttccatcacggtgattgctgaagaattatctggcaatgacgactatgttgagcttgcattcaatgcacggaaattggatgacaaggatttcttcagtaaatctgacccatttctggaaatttttcgtatgaatgatgatgcaactcagcagctggtgcaccgaactgaggttgtgatgaataacttaagcccagcctggaaatcattcaaagtatctgtaaattctctatgcagcggagacccagaccgccggctaaagtgcatagtatgggactgggactccaatggcaagcatgacttcattggagaattcacctcgacattcaaggagatgagaggagcaatggaagggaaacaggtgcagtgggagtgcatcaatcccaagtacaaagccaagaagaagaattacaagaactcaggcactgtgattctgaatctgtgcaagattcacaagatgcattctttcttggactacatcatgggtggctgccaaatccagtttacagtagctatagatttcactgcctcaaacggggaccccaggaacagctgttccttgcactacatccacccttaccaacccaatgagtatctgaaagctttggtagctgtgggggagatttgccaagactatgacagtgacaaaatgttccctgcctttgggtttggcgccaggatacctccagagtacacggtctctcatgactttgcaatcaactttaatgaagacaacccagaatgtgcaggaattcaaggagttgtggaagcctatcagagctgtcttcctaagctccaactctacggtcccaccaacattgcccccatcatccagaaggttgccaagtcagcgtcagaggaaactaacaccaaggaggcatcgcaatacttcatcctgctgatcctgacagatggtgttatcacagacatggccgacacccgggaggccattgtccatgcctcccacctccccatgtcagtcatcatcgtgggagtagggaacgctgacttcagtgacatgcagatgctggacggtgatgatgggattctgaggtcacccaagggagagcctgttcttcgagacatcgtccagttcgtgcccttcaggaacttcaaacacgcatctccagctgccctggcaaagagcgtgctggctgaagtcccaaaccaagttgtggactattacaatggcaaaggaattaaaccaaaatgttcatcagaaatgtatgaatcttccagaacactagcaccatgaactccccacacagttttacagagttctgaaatactattcctgctaatatttcatatttaatacttctactactcctgtactttaaaaaaccaacaacatatacacatttaaaaatagcacgttttggtgatttttaactatctgacaattttttttgcatgtgtagccctgaggcctggatctgttaagcccttgtattgttaactttttacaaagaaacacagataacaataacttactatttacattaca

SEQ ID NO: 29 - DNA, 2120 bp, Homo sapiens
  source 1..2120: mol_type = genomic DNA
aatgctcaccctgactcattcagggaaggatccaaggtttttgatgcagggcactgactctctgcctgtttttccccttcatcatctgctccccttaaaaaatggtatcaactgcattgaaacccggcgagtgaatctacccagagctgaagcttcctttgcaacttgggaacaccagggccacagtgactttgtggcttggctttagataaatttgaccatggctgtagaacccagcagctcagaatccattaaaaggagagctgggaggagaatgaagaagatgagcaacatttatgagtccgctgccaacacactgggaatctttaacagcccctgcctgaccaaagttgagctgcgtgtggcgtgcaaaggcatttctgacagagatgccctttccaaaccagacccctgtgtcatcctcaagatgcagtctcatgggcagtggtttgaggttgacaggactgaggtgattcgcacctgcataaacccagtgtactcaaaactgtttactgtggacttttactttgaggaggtgcagcgcctgcggtttgaagtccatgacatcagcagcaaccacaatgggctgaaggaggccgacttccttggtggcatggagtgcacacttggccagattgtttcccagagaaagctgtccaaatccttgctgaagcatgggaacacagcagggaaatcttccatcacggtgattgctgaagaattatctggcaatgacgactatgttgagcttgcattcaatgcacggaaattggatgacaaggatttcttcagtaaatctgacccatttctggaaatttttcgtatgaatgatgatgcaactcagcagctggtgcaccgaactgaggttgtgatgaataacttaagcccagcctggaaatcattcaaagtatctgtaaattctctatgcagcggagacccagaccgccggctaaagtgcatagtatgggactgggactccaatggcaagcatgacttcattggagaattcacctcgacattcaaggagatgagaggagcaatggaagggaaacaggtgcagtgggagtgcatcaatcccaagtacaaagccaagaagaagaattacaagaactcaggcactgtgattctgaatctgtgcaagattcacaagatgcattctttcttggactacatcatgggtggctgccaaatccagtttacagtagctatagatttcactgcctcaaacggggaccccaggaacagctgttccttgcactacatccacccttaccaacccaatgagtatctgaaagctttggtagctgtgggggagatttgccaagactatgacagtgacaaaatgttccctgcctttgggtttggcgccaggatacctccagagtacacggtctctcatgactttgcaatcaactttaatgaagacaacccagaatgtgcaggaattcaaggagttgtggaagcctatcagagctgtcttcctaagctccaactctacggtcccaccaacattgcccccatcatccagaaggttgccaagtcagcgtcagaggaaactaacaccaaggaggcatcgcaatacttcatcctgctgatcctgacagatggtgttatcacagacatggccgacacccgggaggccattgtccatgcctcccacctccccatgtcagtcatcatcgtgggagtagggaacgctgacttcagtgacatgcagatgctggacggtgatgatgggattctgaggtcacccaagggagagcctgttcttcgagacatcgtccagttcgtgcccttcaggaacttcaaacacgcatctccagctgccctggcaaagagcgtgctggctgaagtcccaaaccaagttgtggactattacaatggcaaaggaattaaaccaaaatgttcatcagaaatgtatgaatcttccagaacactagcaccatgaactccccacacagttttacagagttctgaaatactattcctgctaatatttcatatttaatacttctactactcctgtactttaaaaaaccaacaacatatacacatttaaaaatagcacgttttggtgatttttaactatctgacaattttttttgcatgtgtagccctga

SEQ ID NO: 30 - DNA, 561 bp, Homo sapiens
  source 1..561: mol_type = genomic DNA
agaagggtacaaatcttttttctttctccaaggagaatcttttgagcacaatgaatgaagaagatgagcaacatttatgagtccgctgccaacacactgggaatctttaacagcccctgcctgaccaaagttgagctgcgtgtggcgtgcaaaggcatttctgacagagatgccctttccaaaccagacccctgtgtcatcctcaagatgcagtctcatgggcagtggtttgaggttgacaggactgaggtgattcgcacctgcataaacccagtgtactcaaaactgtttactgtggacttttactttgaggaggtgcagcgcctgcggtttgaagtccatgacatcagcagcaaccacaatgggctgaaggaggccgacttccttggtggcatggagtgcacacttggccagattgtttcccagagaaagctgtccaaatccttgctgaagcatgggaacacagcagggaaatcttccatcacggtgattgctgaagaattatctggcaatgacgactatgttgagcttgcattcaatgcacggaaattggatgacaag

SEQ ID NO: 31 - DNA, 550 bp, Homo sapiens
  source 1..550: mol_type = genomic DNA
gttggagagccagtgacatcccaggcttttgcccaaatgtccttgagttctacaccctgagccttgaaatgcagcttttctggggctgacttcccaggatcggtggtgctgtactttcaggagatggtgtttgctggccagtgaagcacaaaatcagagtgaatgtggttcacatacagctttatgtaggtgcatcaacgagcctggaactaggtgccgggtgccctctaagacaccaagagctattttggaaatagaaagggaacaagtatataaaaatggaagatccagaaatacaaggaatgaagaagatgagcaacatttatgagtccgctgccaacacactgggaatctttaacagcccctgcctgaccaaagttgagctgcgtgtggcgtgcaaaggcatttctgacagagatgccctttccaaaccagacccctgtgtcatcctcaagatgcagtctcatgggcagtggtttgaggttgacaggactgaggtgattcgcacctgcataaacccagtgtactcaaaactgtttactgtggactt

SEQ ID NO: 32 - DNA, 577 bp, Homo sapiens
  source 1..577: mol_type = genomic DNA
atcaaacagaaacccggcgagtgaatctacccagagctgaagcttcctttgcaacttgggaacaccagggccacagtgactttgtggcttggctttagataaatttgaccatggctgtagaacccagcagctcagaatccattaaaaggagagctgggaggagcacctttcccagccgctgttgctaaactgacctcggaggacgagaggggaaggaggtgcgacgccccttacatcagtacaaaactaccacaccaaccacctccacttcaaagccggattttgcatcctgggggcgggacagacctcgtcccgggctgaattctctctccactcttcgagattggcacacccagaatgaagaagatgagcaacatttatgagtccgctgccaacacactgggaatctttaacagcccctgcctgaccaaagttgagctgcgtgtggcgtgcaaaggcatttctgacagagatgccctttccaaaccagacccctgtgtcatcctcaagatgcagtctcatgggcagtggtttgaggttgacaggactgaggtgattcgcacctgcataaacccag

SEQ ID NO: 33 - DNA, 447 bp, Homo sapiens
  source 1..447: mol_type = genomic DNA
ctggaaataagaaaagctctgagggtctccaaagttaccagaggaaggctgaattttatgagtctagtcctcaactctaaccaaagtaaaggaaactggaaagacacacgctttttcagtcattaatagaaagttgtccagaaacccggcgagtgaatctacccagagctgaagcttcctttgcaacttgggaacaccagggccacagtgactttgtggcttggctttagataaatttgaccatggctgtagaacccagcagctcagaatccattaaaaggagagctgggaggaggctcctgccatacgccagacagttttgtagacacgaaggatccagagattagcaacacctttaccatttttggtgacagttaagcacccatctaagaagttttctttgggtttccggagagaccgaactctgctctcagcacctttcccagc

SEQ ID NO: 34 - DNA, 318 bp, Homo sapiens
  source 1..318: mol_type = genomic DNA
tccaaagttaccagaggaaggctgaattttatgaaacccggcgagtgaatctacccagagctgaagcttcctttgcaacttgggaacaccagggccacagtgactttgtggcttggctttagataaatttgaccatggctgtagaacccagcagctcagaatccattaaaaggagagctgggaggaggctcctgccatacgccagacagttttgtagacacgaaggatccagagattagcaacacctttaccatttttggtgacagttaagcacccatctaagaagttttctttggtgagtgccaaaaagtgtaactc

SEQ ID NO: 35 - DNA, 386 bp, Homo sapiens
  source 1..386: mol_type = genomic DNA
gtacctgtctataaggagtcctgcttatcacaatgaatgttctcctgggcagcgttgtgatctttgccaccttcgtgactttatgcaatgcatcatgctatttcatacctaatgagggagttccaggagattcaaccaggatgtttctacacctgtgggttatgacaaagacaactgccaaagaatcttcaagaaggaggactgcaagtatatcgtggtggagaagaaggacccaaaaaagacctgttctgtcagtgaatggataatctaatgtgcttctagtaggcacagggctcccaggccaggcctcattctcctctggcctctaatagtcaatgattgtgtagccatgcctatcagtaaaaagatttttgagcaaacacttg

SEQ ID NO: 36 - DNA, 486 bp, Homo sapiens
  source 1..486: mol_type = genomic DNA
gtacctgtctataaggagtcctgcttatcacaatgaatgttctcctgggcagcgttgtgatctttgccaccttcgtgactttatgcaatgcatcatgctatttcatacctaatgagggagttccaggagattcaaccaggaaatgcatggatctcaaaggaaacaaacacccaataaactcggagtggcagactgacaactgtgagacatgcacttgctacgaaacagaaatttcatgttgcacccttgtttctacacctgtgggttatgacaaagacaactgccaaagaatcttcaagaaggaggactgcaagtatatcgtggtggagaagaaggacccaaaaaagacctgttctgtcagtgaatggataatctaatgtgcttctagtaggcacagggctcccaggccaggcctcattctcctctggcctctaatagtcaatgattgtgtagccatgcctatcagtaaaaagatttttgagcaaa

SEQ ID NO: 37 - DNA, 920 bp, Homo sapiens
  source 1..920: mol_type = genomic DNA
agagaattcaagcctctactaacggccagagacacaggctttcttggcacaagttcaggtagagcactgaaaccacactgctgcttggctccagcaagaccaccttgctaccagtcacagtcacagcccccatgcactgacactgcacactggactccaagaaacccttgccctaagagccagaaccctccacaccatcattcctagggagattctgcatgatgccagtgtccttggaccctctctgaagaggactttttgagaggagagtgtttgtggagccgaggtttgtgcctgtaccctggagtcaaccctctgtaaacactcaatgtgttctcaccttgttatcattcccaatgatgtcgaatgcgtggttgccctctccagtataaaagtttgatgcagctttgcctggatgtacctgtctataaggagtcctgcttatcacaatgaatgttctcctgggcagcgttgtgatctttgccaccttcgtgactttatgcaatgcatcatgctatttcatacctaatgagggagttccaggagattcaaccaggaaatgcatggatctcaaaggaaacaaacacccaataaactcggagtggcagactgacaactgtgagacatgcacttgctacgaaacagaaatttcatgttgcaccctttttgtctcaatgacagtgtttctacacctgtgggttatgacaaagacaactgccaaagaatcttcaagaaggaggactgcaagtatatcgtggtggagaagaaggacccaaaaaagacctgttctgtcagtgaatggataatctaatgtgcttctagtaggcacagggctcccaggccaggcctcattctcctctggcctctaatagtcaatgattgtgtagccatgcctatcagtaaaaagatttttgagcaaa

SEQ ID NO: 38 - DNA, 4110 bp, Homo sapiens
  source 1..4110: mol_type = genomic DNA
agtgcactctagaaacactgctgtggtggagaaactggaccccaggtctggagcgaattccagcctgcagggctgataagcgaggcattagtgagattgagagagactttaccccgccgtggtggttggagggcgcgcagtagagcagcagcacaggcgcgggtcccgggaggccggctctgctcgcgccgagatgtggaatctccttcacgaaaccgactcggctgtggccaccgcgcgccgcccgcgctggctgtgcgctggggcgctggtgctggcgggtggcttctttctcctcggcttcctcttcgggtggtttataaaatcctccaatgaagctactaacattactccaaagcataatatgaaagcatttttggatgaattgaaagctgagaacatcaagaagttcttatataattttacacagataccacatttagcaggaacagaacaaaactttcagcttgcaaagcaaattcaatcccagtggaaagaatttggcctggattctgttgagctagcacattatgatgtcctgttgtcctacccaaataagactcatcccaactacatctcaataattaatgaagatggaaatgagattttcaacacatcattatttgaaccacctcctccaggatatgaaaatgtttcggatattgtaccacctttcagtgctttctctcctcaaggaatgccagagggcgatctagtgtatgttaactatgcacgaactgaagacttctttaaattggaacgggacatgaaaatcaattgctctgggaaaattgtaattgccagatatgggaaagttttcagaggaaataaggttaaaaatgcccagctggcaggggccaaaggagtcattctctactccgaccctgctgactactttgctcctggggtgaagtcctatccagatggttggaatcttcctggaggtggtgtccagcgtggaaatatcctaaatctgaatggtgcaggagaccctctcacaccaggttacccagcaaatgaatatgcttataggcgtggaattgcagaggctgttggtcttccaagtattcctgttcatccaattggatactatgatgcacagaagctcctagaaaaaatgggtggctcagcaccaccagatagcagctggagaggaagtctcaaagtgccctacaatgttggacctggctttactggaaacttttctacacaaaaagtcaagatgcacatccactctaccaatgaagtgacaagaatttacaatgtgataggtactctcagaggagcagtggaaccagacagatatgtcattctgggaggtcaccgggactcatgggtgtttggtggtattgaccctcagagtggagcagctgttgttcatgaaattgtgaggagctttggaacactgaaaaaggaagggtggagacctagaagaacaattttgtttgcaagctgggatgcagaagaatttggtcttcttggttctactgagtgggcagaggagaattcaagactccttcaagagcgtggcgtggcttatattaatgctgactcatctatagaaggaaactacactctgagagttgattgtacaccgctgatgtacagcttggtacacaacctaacaaaagagctgaaaagccctgatgaaggctttgaaggcaaatctctttatgaaagttggactaaaaaaagtccttccccagagttcagtggcatgcccaggataagcaaattgggatctggaaatgattttgaggtgttcttccaacgacttggaattgcttcaggcagagcacggtatactaaaaattgggaaacaaacaaattcagcggctatccactgtatcacagtgtctatgaaacatatgagttggtggaaaagttttatgatccaatgtttaaatatcacctcactgtggcccaggttcgaggagggatggtgtttgagctagccaattccatagtgctcccttttgattgtcgagattatgctgtagttttaagaaagtatgctgacaaaatctacagtatttctatgaaacatccacaggaaatgaagacatacagtgtatcatttgattcacttttttctgcagtaaagaattttacagaaattgcttccaagttcagtgagagactccaggactttgacaaaagcaacccaatagtattaagaatgatgaatgatcaactcatgtttctggaaagagcatttattgatccattagggttaccagacaggcctttttataggcatgtcatctatgctccaagcagccacaacaagtatgcaggggagtcattcccaggaatttatgatgctctgtttgatattgaaagcaaagtggacccttccaaggcctggggagaagtgaagagacagatttatgttgcagccttcacagtgcaggcagctgcagagactttgagtgaagtagcctaagaggattctttagagaatccgtattgaatttgtgtggtatgtcactcagaaagaatcgtaatgggtatattgataaattttaaaattggtatatttgaaataaagttgaatattatatatagttatgtgagtgtttatatatgtgtgtgtttatattgtttatcttctccctatggattaaaactgaatttcataattataagaggttattctgaagtggaaaaatttaactcagtattaaatctaaggagaatggcctaatatagtaaaactctcatctggcattatcagggaatcaagtctaatctattcatgtcacttcacacagaagaaaacatcagtatgtcagagagcacactggggaatatgcacaagattatcccaagccagaggcctcacggcctacctggccagcctgggctgagaggatcactatctcagcacactatttgggaaatggatcaaatcacacttttagtaaatgttatcactctatagcataagaaataattattttttatttatataaaaggctatagtataaaatatatgtatagtaattaaatgaacacttgtgaacctaatagccatatgaagaaaataacatttctaatatctttggatgccccatgtactaatgacagttatgcttttgcattttcttgaattttatgtttatttatctttcctctgtcattatttataattttatcacacatggctgtatcctttacatgttttggcattatgtatttttgaactttttgtaaagacaatcataccatgtgtaattttcagggacttgatttttttcattgacttttaagggttcaaatatattatcactgtggctgtagtttgccatattttgctgatatagagcattcattcacatgagggtaggattcagggtccatcaagacagagaaaacatacagtaatgtgaatagggaaagttaatatgaagaattattaattgttacagcattggaacaatgaaatattgtctagtaatatgtaaagagaagtctcaagaatatgtgatgagcagatgtaaggaattgctcttgtctccatggtgaatttggagcagccaatgaagagtcccctcacattgtggcctcgctcaaagttaagaagtcgctgtagtgttgcccttgaagaatctgcttcaaattgacacttcagaactccccagaaacttgtcttctgggccaatgtgtaaagctgtttatgaagaaatgtcaagccagaggggctctactacaaatttggcaaaggacaatttcaggagaagctcttggccgctgggttctcctggccaccatgaacttcaggaagtgggtgccatagcagcagcctgaactacagaatctgggcactggtgtagctctgtatgccctccgtgtcagatgctggagatgtcatttgcattgccagagtttgccaagggtgcacacagaaagcagattgaaaagcaccctcttggaacatctctccaatgccttctactcacaaagtttaacatcattaacacgtgacaaagaagaactatttaatgggcccagatctatttatgaagacaatcaagtgggagtttggagtggataacccaaatttggataactggtgaataataaaatgtatttatttctgctggtgta

SEQ ID NO: 39 - DNA, 1976 bp, Homo sapiens
  source 1..1976: mol_type = genomic DNA
agcaaatgctcactaccactaataagaacatttctaaatctgatgttctgaggatttttagagcttatagtagcaaaaagaaaagggaaattctatccgagatgtcctttgttgtaggcctaatgagaaaaggttgaagataaagttctggtactcatttaagtgtaatattgaaaattgatattaccgaatctggaacaaccaatttaaaataaggaaagaaagacactgtgttttctaggttaaaaatgcccagctggcaggggccaaaggagtcattctctactccgaccctgctgactactttgctcctggggtgaagtcctatccagatggttggaatcttcctggaggtggtgtccagcgtggaaatatcctaaatctgaatggtgcaggagaccctctcacaccaggttacccagcaaatgaatatgcttataggcgtggaattgcagaggctgttggtcttccaagtattcctgttcatccaattggatactatgatgcacagaagctcctagaaaaaatgggtggctcagcaccaccagatagcagctggagaggaagtctcaaagtgccctacaatgttggacctggctttactggaaacttttctacacaaaaagtcaagatgcacatccactctaccaatgaagtgacaagaatttacaatgtgataggtactctcagaggagcagtggaaccagacagatatgtcattctgggaggtcaccgggactcatgggtgtttggtggtattgaccctcagagtggagcagctgttgttcatgaaattgtgaggagctttggaacactgaaaaaggaagggtggagacctagaagaacaattttgtttgcaagctgggatgcagaagaatttggtcttcttggttctactgagtgggcagaggagaattcaagactccttcaagagcgtggcgtggcttatattaatgctgactcatctatagaaggaaactacactctgagagttgattgtacaccgctgatgtacagcttggtacacaacctaacaaaagagctgaaaagccctgatgaaggctttgaaggcaaatctctttatgaaagttggactaaaaaaagtccttccccagagttcagtggcatgcccaggataagcaaattgggatctggaaatgattttgaggtgttcttccaacgacttggaattgcttcaggcagagcacggtatactaaaaattgggaaacaaacaaattcagcggctatccactgtatcacagtgtctatgaaacatatgagttggtggaaaagttttatgatccaatgtttaaatatcacctcactgtggcccaggttcgaggagggatggtgtttgagctagccaattccatagtgctcccttttgattgtcgagattatgctgtagttttaagaaagtatgctgacaaaatctacagtatttctatgaaacatccacaggaaatgaagacatacagtgtatcatttgattcacttttttctgcagtaaagaattttacagaaattgcttccaagttcagtgagagactccaggactttgacaaaagcaacccaatagtattaagaatgatgaatgatcaactcatgtttctggaaagagcatttattgatccattagggttaccagacaggcctttttataggcatgtcatctatgctccaagcagccacaacaagtatgcaggggagtcattcccaggaatttatgatgctctgtttgatattgaaagcaaagtggacccttccaaggcctggggagaagtgaagagacagatttatgttgcagccttcacagtgcaggcagctgcagagactttgagtgaagtagcctaagaggattctttagagaatccgtattgaatttgtgtggtatgtcactcagaaagaatcgtaatgggtatattgataaattttaaaattggtatatttgaaataaagttgaatattatatata

SEQ ID NO: 40 - DNA, 2403 bp, Homo sapiens
  source 1..2403: mol_type = genomic DNA
ggctgataagcgaggcattagtgagattgagagagactttaccccgccgtggtggttggagggcgcgcagtagagcagcagcacaggcgcgggtcccgggaggccggctctgctcgcgccgagatgtggaatctccttcacgaaaccgactcggctgtggccaccgcgcgccgcccgcgctggctgtgcgctggggcgctggtgctggcgggtggcttctttctcctcggcttcctcttcgggtggtttataaaatcctccaatgaagctactaacattactccaaagcataatatgaaagcatttttggatgaattgaaagctgagaacatcaagaagttcttatataattttacacagataccacatttagcaggaacagaacaaaactttcagcttgcaaagcaaattcaatcccagtggaaagaatttggcctggattctgttgagctagcacattatgatgtcctgttgtcctacccaaataagactcatcccaactacatctcaataattaatgaagatggaaatgagattttcaacacatcattatttgaaccacctcctccaggatatgaaaatgtttcggatattgtaccacctttcagtgctttctctcctcaaggaatgccagagggcgatctagtgtatgttaactatgcacgaactgaagacttctttaaattggaacgggacatgaaaatcaattgctctgggaaaattgtaattgccagatatgggaaagttttcagaggaaataaggttaaaaatgcccagctggcaggggccaaaggagtcattctctactccgaccctgctgactactttgctcctggggtgaagtcctatccagatggttggaatcttcctggaggtggtgtccagcgtggaaatatcctaaatctgaatggtgcaggagaccctctcacaccaggttacccagcaaatgaatatgcttataggcgtggaattgcagaggctgttggtcttccaagtattcctgttcatccaattggatactatgatgcacagaagctcctagaaaaaatgggtggctcagcaccaccagatagcagctggagaggaagtctcaaagtgccctacaatgttggacctggctttactggaaacttttctacacaaaaagtcaagatgcacatccactctaccaatgaagtgacaagaatttacaatgtgataggtactctcagaggagcagtggaaccagacagatatgtcattctgggaggtcaccgggactcatgggtgtttggtggtattgaccctcagagtggagcagctgttgttcatgaaattgtgaggagctttggaacactgaaaaaggaagggtggagacctagaagaacaattttgtttgcaagctgggatgcagaagaatttggtcttcttggttctactgagtgggcagaggagaattcaagactccttcaagagcgtggcgtggcttatattaatgctgactcatctatagaaggaaactacactctgagagttgattgtacaccgctgatgtacagcttggtacacaacctaacaaaagagctgaaaagccctgatgaaggctttgaaggcaaatctctttatgaaagttggactaaaaaaagtccttccccagagttcagtggcatgcccaggataagcaaattgggatctggaaatgattttgaggtgttcttccaacgacttggaattgcttcaggcagagcacggtatactaaaaattgggaaacaaacaaattcagcggctatccactgtatcacagtgtctatgaaacatatgagttggtggaaaagttttatgatccaatgtttaaatatcacctcactgtggcccaggttcgaggagggatggtgtttgagctagccaattccatagtgctcccttttgattgtcgagattatgctgtagttttaagaaagtatgctgacaaaatctacagtatttctatgaaacatccacaggaaatgaagacatacagtgtatcatttgattcacttttttctgcagtaaagaattttacagaaattgcttccaagttcagtgagagactccaggactttgacaaaagcaagcatgtcatctatgctccaagcagccacaacaagtatgcaggggagtcattcccaggaatttatgatgctctgtttgatattgaaagcaaagtggacccttccaaggcctggggagaagtgaagagacagatttatgttgcagccttcacagtgcaggcagctgcagagactttgagtgaagtagcctaagaggattctttagagaatccgtattgaatttgtgtggtatgtcactcagaaagaatcgtaatgggtatattgataaattttaaaattggtatatttgaaataaagttgaatattatatat

SEQ ID NO: 41 - DNA, 2192 bp, Homo sapiens
  source 1..2192: mol_type = genomic DNA
agtgcactctagaaacactgctgtggtggagaaactggaccccaggtctggagcgaattccagcctgcagggctgataagcgaggcattagtgagattgagagagactttaccccgccgtggtggttggagggcgcgcagtagagcagcagcacaggcgcgggtcccgggaggccggctctgctcgcgccgagatgtggaatctccttcacgaaaccgactcggctgtggccaccgcgcgccgcccgcgctggctgtgcgctggggcgctggtgctggcgggtggcttctttctcctcggcttcctcttcgggtggtttataaaatcctccaatgaagctactaacattactccaaagcataatatgaaagcatttttggatgaattgaaagctgagaacatcaagaagttcttataattttcaacacatcattatttgaaccacctcctccaggatatgaaaatgtttcggatattgtaccacctttcagtgctttctctcctcaaggaatgccagagggcgatctagtgtatgttaactatgcacgaactgaagacttctttaaattggaacgggacatgaaaatcaattgctctgggaaaattgtaattgccagatatgggaaagttttcagaggaaataagaatatgcttataggcgtggaattgcagaggctgttggtcttccaagtattcctgttcatccaattggatactatgatgcacagaagctcctagaaaaaatgggtggctcagcaccaccagatagcagctggagaggaagtctcaaagtgccctacaatgttggacctggctttactggaaacttttctacacaaaaagtcaagatgcacatccactctaccaatgaagtgacaagaatttacaatgtgataggtactctcagaggagcagtggaaccagacagatatgtcattctgggaggtcaccgggactcatgggtgtttggtggtattgaccctcagagtggagcagctgttgttcatgaaattgtgaggagctttggaacactgaaaaaggaagggtggagacctagaagaacaattttgtttgcaagctgggatgcagaagaatttggtcttcttggttctactgagtgggcagaggagaattcaagactccttcaagagcgtggcgtggcttatattaatgctgactcatctatagaaggaaactacactctgagagttgattgtacaccgctgatgtacagcttggtacacaacctaacaaaagagctgaaaagccctgatgaaggctttgaaggcaaatctctttatgaaagttggactaaaaaaagtccttccccagagttcagtggcatgcccaggataagcaaattgggatctggaaatgattttgaggtgttcttccaacgacttggaattgcttcaggcagagcacggtatactaaaaattgggaaacaaacaaattcagcggctatccactgtatcacagtgtctatgaaacatatgagttggtggaaaagttttatgatccaatgtttaaatatcacctcactgtggcccaggttcgaggagggatggtgtttgagctagccaattccatagtgctcccttttgattgtcgagattatgctgtagttttaagaaagtatgctgacaaaatctacagtatttctatgaaacatccacaggaaatgaagacatacagtgtatcatttgattcacttttttctgcagtaaagaattttacagaaattgcttccaagttcagtgagagactccaggactttgacaaaagcaacccaatagtattaagaatgatgaatgatcaactcatgtttctggaaagagcatttattgatccattagggttaccagacaggcctttttataggcatgtcatctatgctccaagcagccacaacaagtatgcaggggagtcattcccaggaatttatgatgctctgtttgatattgaaagcaaagtggacccttccaaggcctggggagaagtgaagagacagatttatgttgcagccttcacagtgcaggcagctgcagagactttgagtgaagtagcctaagaggattctttagagaatccgtattgaatttgtgtggtatgtcactcagaaagaatcgtaatgggtatattgataaattttaaaattggtatatttgaaataaagttgaatattatatat

SEQ ID NO: 42 - DNA, 2697 bp, Homo sapiens
  source 1..2697: mol_type = genomic DNA
agatgttgcctctctctctcgctcggattggttcagtgcactctagaaacactgctgtggtggagaaactggaccccaggtctggagcgaattccagcctgcagggctgataagcgaggcattagtgagattgagagagactttaccccgccgtggtggttggagggcgcgcagtagagcagcagcacaggcgcgggtcccgggaggccggctctgctcgcgccgagatgtggaatctccttcacgaaaccgactcggctgtggccaccgcgcgccgcccgcgctggctgtgcgctggggcgctggtgctggcgggtggcttctttctcctcggcttcctcttcggttaaaagccaactgcaaggtctaatgactgcaggatctagctatccattgtttctggccgcctatgcgtgcactgggtgtctggcagagaggctggggtggtttataaaatcctccaatgaagctactaacattactccaaagcataatatgaaagcatttttggatgaattgaaagctgagaacatcaagaagttcttatataattttacacagataccacatttagcaggaacagaacaaaactttcagcttgcaaagcaaattcaatcccagtggaaagaatttggcctggattctgttgagctagcacattatgatgtcctgttgtcctacccaaataagactcatcccaactacatctcaataattaatgaagatggaaatgagattttcaacacatcattatttgaaccacctcctccaggatatgaaaatgtttcggatattgtaccacctttcagtgctttctctcctcaaggaatgccagagggcgatctagtgtatgttaactatgcacgaactgaagacttctttaaattggaacgggacatgaaaatcaattgctctgggaaaattgtaattgccagatatgggaaagttttcagaggaaataaggttaaaaatgcccagctggcaggggccaaaggagtcattctctactccgaccctgctgactactttgctcctggggtgaagtcctatccagatggttggaatcttcctggaggtggtgtccagcgtggaaatatcctaaatctgaatggtgcaggagaccctctcacaccaggttacccagcaaatgaatatgcttataggcgtggaattgcagaggctgttggtcttccaagtattcctgttcatccaattggatactatgatgcacagaagctcctagaaaaaatgggtggctcagcaccaccagatagcagctggagaggaagtctcaaagtgccctacaatgttggacctggctttactggaaacttttctacacaaaaagtcaagatgcacatccactctaccaatgaagtgacaagaatttacaatgtgataggtactctcagaggagcagtggaaccagacagatatgtcattctgggaggtcaccgggactcatgggtgtttggtggtattgaccctcagagtggagcagctgttgttcatgaaattgtgaggagctttggaacactgaaaaaggaagggtggagacctagaagaacaattttgtttgcaagctgggatgcagaagaatttggtcttcttggttctactgagtgggcagaggagaattcaagactccttcaagagcgtggcgtggcttatattaatgctgactcatctatagaaggaaactacactctgagagttgattgtacaccgctgatgtacagcttggtacacaacctaacaaaagagctgaaaagccctgatgaaggctttgaaggcaaatctctttatgaaagttggactaaaaaaagtccttccccagagttcagtggcatgcccaggataagcaaattgggatctggaaatgattttgaggtgttcttccaacgacttggaattgcttcaggcagagcacggtatactaaaaattgggaaacaaacaaattcagcggctatccactgtatcacagtgtctatgaaacatatgagttggtggaaaagttttatgatccaatgtttaaatatcacctcactgtggcccaggttcgaggagggatggtgtttgagctagccaattccatagtgctcccttttgattgtcgagattatgctgtagttttaagaaagtatgctgacaaaatctacagtatttctatgaaacatccacaggaaatgaagacatacagtgtatcatttgattcacttttttctgcagtaaagaattttacagaaattgcttccaagttcagtgagagactccaggactttgacaaaagcaacccaatagtattaagaatgatgaatgatcaactcatgtttctggaaagagcatttattgatccattagggttaccagacaggcctttttataggcatgtcatctatgctccaagcagccacaacaagtatgcaggggagtcattcccaggaatttatgatgctctgtttgatattgaaagcaaagtggacccttccaaggcctggggagaagtgaagagacagatttatgttgcagccttcacagtgcaggcagctgcagagactttgagtgaagtagcctaagaggattctttagagaatccgtattgaatttgtgtggtatgtcactcagaaagaatcgtaatgggtatattgataaattttaaaattggtatatttgaaataaagttgaatattatatat

SEQ ID NO: 43 - DNA, 2225 bp, Homo sapiens
  source 1..2225: mol_type = genomic DNA
ccaccgcgcgccgcccgcgctggctgtgcgctggggcgctggtgctggcgggtggcttctttctcctcggcttcctcttcggttaaaagccaactgcaaggtctaatgactgcaggatctagctatccattgtttctggccgcctatgcgtgcactgggtgtctggcagagaggctggggtggtttataaaatcctccaatgaagctactaacattactccaaagcataatatgaaagcatttttggatgaattgaaagctgagaacatcaagaagttcttatataattttacacagataccacatttagcaggaacagaacaaaactttcagcttgcaaagcaaattcaatcccagtggaaagaatttggcctggattctgttgagctagcacattatgatgtcctgttgtcctacccaaataagactcatcccaactacatctcaataattaatgaagatggaaatgagattttcaacacatcattatttgaaccacctcctccaggatatgaaaatgtttcggatattgtaccacctttcagtgctttctctcctcaaggaatgccagagggcgatctagtgtatgttaactatgcacgaactgaagacttctttaaattggaacgggacatgaaaatcaattgctctgggaaaattgtaattgccagatatgggaaagttttcagaggaaataaggttaaaaatgcccagctggcaggggccaaaggagtcattctctactccgaccctgctgactactttgctcctggggtgaagtcctatccagatggttggaatcttcctggaggtggtgtccagcgtggaaatatcctaaatctgaatggtgcaggagaccctctcacaccaggttacccagcaaatgaatatgcttataggcgtggaattgcagaggctgttggtcttccaagtattcctgttcatccaattggatactatgatgcacagaagctcctagaaaaaatgggtggctcagcaccaccagatagcagctggagaggaagtctcaaagtgccctacaatgttggacctggctttactggaaacttttctacacaaaaagtcaagatgcacatccactctaccaatgaagtgacaagaatttacaatgtgataggtactctcagaggagcagtggaaccagacagatatgtcattctgggaggtcaccgggactcatgggtgtttggtggtattgaccctcagagtggagcagctgttgttcatgaaattgtgaggagctttggaacactgaaaaaggaagggtggagacctagaagaacaattttgtttgcaagctgggatgcagaagaatttggtcttcttggttctactgagtgggcagaggagaattcaagactccttcaagagcgtggcgtggcttatattaatgctgactcatctatagaaggaaactacactctgagagttgattgtacaccgctgatgtacagcttggtacacaacctaacaaaagagctgaaaagccctgatgaaggctttgaaggcaaatctctttatgaaagttggactaaaaaaagtccttccccagagttcagtggcatgcccaggataagcaaattgggatctggaaatgattttgaggtgttcttccaacgacttggaattgcttcaggcagagcacggtatactaaaaattgggaaacaaacaaattcagcggctatccactgtatcacagtgtctatgaaacatatgagttggtggaaaagttttatgatccaatgtttaaatatcacctcactgtggcccaggttcgaggagggatggtgtttgagctagccaattccatagtgctcccttttgattgtcgagattatgctgtagttttaagaaagtatgctgacaaaatctacagtatttctatgaaacatccacaggaaatgaagacatacagtgtatcatttgattcacttttttctgcagtaaagaattttacagaaattgcttccaagttcagtgagagactccaggactttgacaaaagcaagcatgtcatctatgctccaagcagccacaacaagtatgcaggggagtcattcccaggaatttatgatgctctgtttgatattgaaagcaaagtggacccttccaaggcctggggagaagtgaagagacagatttatgttgcagccttcacagtgcaggcagctgcagagactttgagtgaagtagcctaagagga

SEQ ID NO: 44 - DNA, 498 bp, Homo sapiens
  source 1..498: mol_type = genomic DNA
aattgcttcaggcagagcacggtatactaaaaattgggaaacaaacaaattcagcggctatccactgtatcacagtgtctatgaaacatatgagttggtggaaaagttttatgatccaatgtttaaatatcacctcactgtggcccaggttcgaggagggatggtgtttgagctagccaattccatagtgctcccttttgattgtcgagattatgctgtagttttaagaaagtatgctgacaaaatctacagtatttctatgaaacatccacaggaaatgaagacatacagtgtatcatttggtatgttacccttcctttttcaaattcctcatctgtatggttctattaatctcctaaatataatgggctatcttaggtcatttattatttattgctatttcaagtgatccaatattctgtttatgtctataaatgtattttccattttatggatgctcacgtcttataatataaaaatataaataccttgtaaaac

SEQ ID NO: 45 - DNA, 611 bp, Homo sapiens
  source 1..611: mol_type = genomic DNA
tagaaaaatgggtggctcagcaccaccagatagcagctggagaggaagtctcaaagtgccctacaatgttggacctggctttactggaaacttttctacacaaaaagtcaagatgcacatccactctaccaatgaagtgacaagaatttacaatgtgataggtactctcagaggagcagtggaaccagacagatatgtcattctgggaggtcaccgggactcatgggtgtttggtggtattgaccctcagagtggagcagctgttgttcatgaaattgtgaggagctttggaacactgaaaaaggaagggtggagacctagaagaacaattttgtttgcaagctgggatgcagaagaatttggtcttcttggttctactgagtgggcagaggagaattcaagactccttcaagagcgtggcgtggcttatattaatgctgactcatctatagaaggaaactacactctgagagttgattgtacaccgctgatgtacagcttggtacacaacctaacaaaagaggtactgtaaaatctgaggcaactagcgattggagtcgaccccccagcacaacacagcagccctgcagaaaagtggctagactgtttaa

SEQ ID NO: 46 - DNA, 387 bp, Homo sapiens
  source 1..387: mol_type = genomic DNA
gcgatctagtgtatgttaactatgcacgaactgaagacttctttaaattggaacgggacatgaaaatcaattgctctgggaaaattgtaattgccagatatgggaaagttttcagaggaaataaggttaaaaatgcccagctggcaggggccaaaggagtcattctctactccgaccctgctgactactttgctcctggggtgaagtcctatccagatggttggaatcttcctggaggtggtgtccagcgtggaaatatcctaaatctgaatggtgcaggagaccctctcacaccaggttacccagcaaatggtgaatgatcaatccttgaatatcataggaaacttaacatttgaaagagactttattaaagaatttcctttggta

SEQ ID NO: 47 - DNA, 567 bp, Homo sapiens
  source 1..567: mol_type = genomic DNA
tggcgggtggcttctttctcctcggcttcctcttcggttaaaagccaactgcaaggtctaatgactgcaggatctagctatccattgtttctggccgcctatgcgtgcactgggtgtctggcagagaggctggggtggtttataaaatcctccaatgaagctactaacattactccaaagcataatatgaaagcatttttggatgaattgaaagctgagaacatcaagaagttcttatataattttacacagataccacatttagcaggaacagaacaaaactttcagcttgcaaagcaaattcaatcccagtggaaagaatttggcctggattctgttgagctagcacattatgatgtcctgttgtcctacccaaataagactcatcccaactacatctcaataattaatgaagatggaaatgagattttcaacacatcattatttgaaccacctcctccaggatatgaaaatgtttcggatattgtaccacctttcagtgctttctctcctcaaggaatgccagaggtaaaaacacagtgcaacaaataaaaatgacaaaaagaa

SEQ ID NO: 48 - DNA, 751 bp, Homo sapiens
  source 1..751: mol_type = genomic DNA
tagaaacactgctgtggtggagaaactggaccccaggtctggagcgaattccagcctgcagggctgataagcgaggcattagtgagattgagagagactttaccccgccgtggtggttggagggcgcgcagtagagcagcagcacaggcgcgggtcccgggaggccggctctgctcgcgccgagatgtggaatctccttcacgaaaccgactcggctgtggccaccgcgcgccgcccgcgctggctgtgcgctggggcgctggtgctggcgggtggcttctttctcctcggcttcctcttcgtgaaagtaggcaagagaaattaaaattcagaaatatctcacctaatgtcagagggtggtttataaaatcctccaatgaagctactaacattactccaaagcataatatgaaagcatttttggatgaattgaaagctgagaacatcaagaagttcttatataattttacacagataccacatttagcaggaacagaacaaaactttcagcttgcaaagcaaattcaatcccagtggaaagaatttggcctggattctgttgagctagcacattatgatgtcctgttgtcctacccaaataagactcatcccaactacatctcaataattaatgaagatggaaatgagattttcaacacatcattatttgaaccacctcctccaggatatgaaaatgtttcggatattgtaccacctttcagtgctttctctcctcaaggaatgccagagg

SEQ ID NO: 49 - DNA, 540 bp, Homo sapiens
  source 1..540: mol_type = genomic DNA
atgtggggtgagcacccctcgagttaggaggagggtagctgggaacggtgcagggctgagttctcgacaagctgctggtaggacagtcactcaggttgagggtagaactgagagaacctgaaactgggcgtaggaaggttccaagtgctggagccctgcaagacagaggaagttttttttttgcttttgttttgttttgttttgttttgtttgtttgtttgtttttttacctctctgtgcattctttcttccttggaagtaacagaggcaagcttgggaactgtgtgaaccagggtggtttataaaatcctccaatgaagctactaacattactccaaagcataatatgaaagcatttttggatgaattgaaagctgagaacatcaagaagttcttatataattttacacagataccacatttagcaggaacagaacaaaactttcagcttgcaaagcaaattcaatcccagtggaaagaatttggcctggattctgttgagctagcacattatgatgtcctgttgtcctacccaaataa

SEQ ID NO: 50 - DNA, 660 bp, Homo sapiens
  source 1..660: mol_type = genomic DNA
gcagatgttgcctctctctctcgctcggattggttcagtgcactctagaaacactgctgtggtggagaaactggaccccaggtctggagcgaattccagcctgcagggctgataagcgaggcattagtgagattgagagagactttaccccgccgtggtggttggagggcgcgcagtagagcagcagcacaggcgcgggtcccgggaggccggctctgctcgcgccgagatgtggaatctccttcacgaaaccgactcggctgtggccaccgcgcgccgcccgcgctggctgtgcgctggggcgctggtgctggcgggtggcttctttctcctcggcttcctcttcgtaacagaggcaagcttgggaactgtgtgaaccaggtcagcaatctggacaggtctttaccagcgggtcttttgctgtttttcctgggtactgatttgcagacttgatccaactttctaagaaaagcagaaccacacagggtggtttataaaatcctccaatgaagctactaacattactccaaagcataatatgaaagcatttttggatgaattgaaagctgagaacatcaagaagttcttatataattttacacagataccacatttagcaggaacagaacaaaactttcagcttgcaaagcaaattcaatc

SEQ ID NO: 51 - DNA, 512 bp, Homo sapiens
  source 1..512: mol_type = genomic DNA
agtttctcagccacagagattcacagcctagggcaggaggacactgtacaccaggcagaatgacatgggaattgcgctcacgattggcttgaagaagcaaggactgtgggagatcacatctccatgatccataggccctgcccaatctgacctcacaccgtgggaatgcctccagactgatctagtgccgtgcccctcatccagtctcggattgtgggaggctgggagtgtgagaagcattcccaaccctggcaggtggctgtgtacagtcatggatgggcacactgtgggggtgtcctggtgcacccccagtgggtgctcacagctgcccattgcctaaagaagaatagccaggtctggctgggtcggcacaacctgtttgagcctgaagacacaggccagagggtccctgtcagccacagcttcccacacccgctctacaatatgagccttctgaagcatcaaagccttagaccagatgaagactccagccatgacctcatgctgctccg

SEQ ID NO: 52 - DNA, 552 bp, Homo sapiens
  source 1..552: mol_type = genomic DNA
gcgactatccctgcagcgcgcctctcccgtcacgtcccaaccatggagctgtggacgtgcgtcccctggtggatgtggcctgcgtggtgccaggccggggcctggtgtccgataaagatcctagaaccacaggaaaccaggactgaaagatcacatctccatgatccataggccctgcccaatctgacctcacaccgtgggaatgcctccagactgatctagtgccgtgcccctcatccagtctcggattgtgggaggctgggagtgtgagaagcattcccaaccctggcaggtggctgtgtacagtcatggatgggcacactgtgggggtgtcctggtgcacccccagtgggtgctcacagctgcccattgcctaaagaagtaagtaggaccctgggatctggggagggaatggctgtgtcccacaggaataacagcgggatgcttcccccagggtcacttctcaggtgaggcttcagactaaaggagagagggaaggtcctggcccaggtcgcacccggaggcagagctggggctggaccactctcccca

SEQ ID NO: 53 - DNA, 561 bp, Homo sapiens
  source 1..561: mol_type = genomic DNA
agcgcgcctctcccgtcacgtcccaaccatggagctgtggacgtgcgtcccctggtggatgtggcctgcgtggtgccaggccggggcctggtgtccgataaagatcctagaaccacaggaaaccaggactgaaaggtgctagagaatggccatatgtcgctgtccatgaaatctcaaggacttctgggtggagggcacaggagcctgaacttacgggtttgccccactccactgtcctcccaaatcacatctccatgatccataggccctgcccaatctgacctcacaccgtgggaatgcctccagactgatctagtgccgtgcccctcatccagtctcggattgtgggaggctgggagtgtgagaagcattcccaaccctggcaggtggctgtgtacagtcatggatgggcacactgtgggggtgtcctggtgcacccccagtgggtgctcacagctgcccattgcctaaagaagaatagccaggtctggctgggtcggcacaacctgtttgagcctgaagacacaggccagagggtccctgtcagccacagcttcccac

SEQ ID NO: 54 - DNA, 530 bp, Homo sapiens
  source 1..530: mol_type = genomic DNA
gaaaggtgctagagaatggccatatgtcgctgtccatgaaatctcaaggacttctgggtggagggcacaggagcctgaacttacgggtttgccccactccactgtcctcccaaatcacatctccatgatccataggccctgcccaatctgacctcacaccgtgggaatgcctccagactgatctagaatagccaggtctggctgggtcggcacaacctgtttgagcctgaagacacaggccagagggtccctgtcagccacagcttcccacacccgctctacaatatgagccttctgaagcatcaaagccttagaccagatgaagactccagccatgacctcatgctgctccgcctgtcagagcctgccaagatcacagatgttgtgaaggtcctgggcctgcccacccaggagccagcactggggaccacctgctacgcctcaggctggggcagcatcgaaccagaggagtgagtcttcagtgtgtgagcctccatctcctgtccaatgacatgtgtgctagagcttac

SEQ ID NO: 55 - DNA, 543 bp, Homo sapiens
  source 1..543: mol_type = genomic DNA
agctctgggtgtgggagggggttgtccagcctccagcagcatggggagggccttggtcagcatctaggtgccaacagggcaagggcggggtcctggagaatgaaggctttatagggctcctcagggaggccccccagccccaaactcaccacctggccgtggacacctgtgtcagcatgtgggacctggttctctccatcgccttgtctgtggggtgcactggtgccgtgcccctcatccagtctcggattgtgggaggctgggagtgtgagaagcattcccaaccctggcaggtggctgtgtacagtcatggatgggcacactgtgggggtgtcctggtgcacccccagtgggtgctcacagctgcccattgcctaaagaaagcctgccaagatcacagatgttgtgaaggtcctgggcctgcccacccaggagccagcactggggaccacctgctacgcctcaggctggggcagcatcgaaccagaggagttcttgcgccccaggagtcttcagtgtgtgagcctccatctcctgtccaat

SEQ ID NO: 56 - DNA, 911 bp, Homo sapiens
  source 1..911: mol_type = genomic DNA
agccccaaactcaccacctggccgtggacacctgtgtcagcatgtgggacctggttctctccatcgccttgtctgtggggtgcactggaatagccaggtctggctgggtcggcacaacctgtttgagcctgaagacacaggccagagggtccctgtcagccacagcttcccacacccgctctacaatatgagccttctgaagcatcaaagccttagaccagatgaagactccagccatgacctcatgctgctccgcctgtcagagcctgccaagatcacagatgttgtgaaggtcctgggcctgcccacccaggagccagcactggggaccacctgctacgcctcaggctggggcagcatcgaaccagaggagtgtacgcctgggccagatggtgtagctgggagcccagatgcctgggtctgagggaagtggggccaaagaaccaggtggggtccggccacagcccagtttttctctgacccatagtcttgcgccccaggagtcttcagtgtgtgagcctccatctcctgtccaatgacatgtgtgctagagcttactctgagaaggtgacagagttcatgttgtgtgctgggctctggacaggtggtaaagacacttgtggggtgagtcatccctactcccaacatctggaggggaaaggtgagtgaagaccctaattctgggctgcaatctgaaagctaaccagacatctgcctcccctgctccccagctatagccacgccccctccccatgcctcatctgccgccctccttcccccttccctgactccctcaacacaagaggtgattctcacagcataattcacccattcctgtgttgagcacatgcttactgggcacctgctacgtgaccagcattgccgtagaccctgggaagcagcagtgaaca

SEQ ID NO: 57 - DNA, 1002 bp, Homo sapiens
  source 1..1002: mol_type = genomic DNA
agccccaaactcaccacctggccgtggacacctgtgtcagcatgtgggacctggttctctccatcgccttgtctgtggggtgcactggtgccgtgcccctcatccagtctcggattgtgggaggctgggagtgtgagaagcattcccaaccctggcaggtggctgtgtacagtcatggatgggcacactgtgggggtgtcctggtgcacccccagtgggtgctcacagctgcccattgcctaaagaagtaagtaggaccctgggatctggggagggaatggctgtgtcccacaggaataacagcgggatgcttcccccagggtcacttctcaggaatagccaggtctggctgggtcggcacaacctgtttgagcctgaagacacaggccagagggtccctgtcagccacagcttcccacacccgctctacaatatgagccttctgaagcatcaaagccttagaccagatgaagactccagccatgacctcatgctgctccgcctgtcagagcctgccaagatcacagatgttgtgaaggtcctgggcctgcccacccaggagccagcactggggaccacctgctacgcctcaggctggggcagcatcgaaccagaggagttcttgcgccccaggagtcttcagtgtgtgagcctccatctcctgtccaatgacatgtgtgctagagcttactctgagaaggtgacagagttcatgttgtgtgctgggctctggacaggtggtaaagacacttgtgggggtgattctgggggtccacttgtctgtaatggtgtgcttcaaggtatcacatcatggggccctgagccatgtgccctgcctgaaaagcctgctgtgtacaccaaggtggtgcattaccggaagtggatcaaggacaccatcgcagccaacccctgagtgcccctgtcccacccctacctctagtaaatttaagtccacctcacgttctggcatcacttggcctttctggatgctggacacctgaa

SEQ ID NO: 58 - DNA, 2674 bp, Homo sapiens
  source 1..2674: mol_type = genomic DNA
agccccaaactcaccacctggccgtggacacctgtgtcagcatgtgggacctggttctctccatcgccttgtctgtggggtgcactggaatagccaggtctggctgggtcggcacaacctgtttgagcctgaagacacaggccagagggtccctgtcagccacagcttcccacacccgctctacaatatgagccttctgaagcatcaaagccttagaccagatgaagactccagccatgacctcatgctgctccgcctgtcagagcctgccaagatcacagatgttgtgaaggtcctgggcctgcccacccaggagccagcactggggaccacctgctacgcctcaggctggggcagcatcgaaccagaggagttcttgcgccccaggagtcttcagtgtgtgagcctccatctcctgtccaatgacatgtgtgctagagcttactctgagaaggtgacagagttcatgttgtgtgctgggctctggacaggtggtaaagacacttgtgggggtgattctgggggtccacttgtctgtaatggtgtgcttcaaggtatcacatcatggggccctgagccatgtgccctgcctgaaaagcctgctgtgtacaccaaggtggtgcattaccggaagtggatcaaggacaccatcgcagccaacccctgagtgcccctgtcccacccctacctctagtaaatttaagtccacctcacgttctggcatcacttggcctttctggatgctggacacctgaagcttggaactcacctggccgaagctcgagcctcctgagtcctactgacctgtgctttctggtgtggagtccagggctgctaggaaaaggaatgggcagacacaggtgtatgccaatgtttctgaaatgggtataatttcgtcctctccttcggaacactggctgtctctgaagacttctcgctcagtttcagtgaggacacacacaaagacgtgggtgaccatgttgtttgtggggtgcagagatgggaggggtggggcccaccctggaagagtggacagtgacacaaggtggacactctctacagatcactgaggataagctggagccacaatgcatgaggcacacacacagcaaggatgacgctgtaaacatagcccacgctgtcctgggggcactgggaagcctagataaggccgtgagcagaaagaaggggaggatcctcctatgttgttgaaggagggactagggggagaaactgaaagctgattaattacaggaggtttgttcaggtcccccaaaccaccgtcagatttgatgatttcctagcaggacttacagaaataaagagctatcatgctgtggtttattatggtttgttacattgataggatacatactgaaatcagcaaacaaaacagatgtatagattagagtgtggagaaaacagaggaaaacttgcagttacgaagactggcaacttggctttactaagttttcagactggcaggaagtcaaacctattaggctgaggaccttgtggagtgtagctgatccagctgatagaggaactagccaggtgggggcctttccctttggatggggggcatatctgacagttattctctccaagtggagacttacggacagcatataattctccctgcaaggatgtatgataatatgtacaaagtaattccaactgaggaagctcacctgatccttagtgtccagggtttttactgggggtctgtaggacgagtatggagtacttgaataattgacctgaagtcctcagacctgaggttccctagagttcaaacagatacagcatggtccagagtcccagatgtacaaaaacagggattcatcacaaatcccatctttagcatgaagggtctggcatggcccaaggccccaagtatatcaaggcacttgggcagaacatgccaaggaatcaaatgtcatctcccaggagttattcaagggtgagccctttacttgggatgtacaggctttgagcagtgcagggctgctgagtcaaccttttattgtacaggggatgagggaaagggagaggatgaggaagcccccctggggatttggtttggtcttgtgatcaggtggtctatggggctatccctacaaagaagaatccagaaataggggcacattgaggaatgatactgagcccaaagagcattcaatcattgttttatttgccttcttttcacaccattggtgagggagggattaccaccctggggttatgaagatggttgaacaccccacacatagcaccggagatatgagatcaacagtttcttagccatagagattcacagcccagagcaggaggacgctgcacaccatgcaggatgacatgggggatgcgctcgggattggtgtgaagaagcaaggactgttagaggcaggctttatagtaacaagacggtggggcaaactctgatttccgtgggggaatgtcatggtcttgctttactaagttttgagactggcaggtagtgaaactcattaggctgagaaccttgtggaatgcagctgacccagctgatagaggaagtagccaggtgggagcctttcccagtgggtgtgggacatatctggcaagattttgtggcactcctggttacagatactggggcagcaaataaaactgaatcttgttttcagacctt

SEQ ID NO: 59 - DNA, 721 bp, Homo sapiens
  source 1..721: mol_type = genomic DNA
cccaaactcaccacctggccgtggacacctgtgtcagcatgtgggacctggttctctccatcgccttgtctgtggggtgcactggaatagccaggtctggctgggtcggcacaacctgtttgagcctgaagacacaggccagagggtccctgtcagccacagcttcccacacccgctctacaatatgagccttctgaagcatcaaagccttagaccagatgaagactccagccatgacctcatgctgctccgcctgtcagagcctgccaagatcacagatgttgtgaaggtcctgggcctgcccacccaggagccagcactggggaccacctgctacgcctcaggctggggcagcatcgaaccagaggagttcttgcgccccaggagtcttcagtgtgtgagcctccatctcctgtccaatgacatgtgtgctagagcttactctgagaaggtgacagagttcatgttgtgtgctgggctctggacaggtggtaaagacacttgtggggtgagtcatccctactcccaacatctggaggggaaaggtgagtgaagaccctaattctgggctgcaatctgaaagctaaccagacatctgcctcccctgctccccagctatagccacgccccctccccatgcctcatctgccgccctccttcccccttccctgactccctcaacacaagaggtgattctcacagcataattcacccattcctg

SEQ ID NO: 60 - DNA, 744 bp, Homo sapiens
  source 1..744: mol_type = genomic DNA
aaactcaccacctggccgtggacacctgtgtcagcatgtgggacctggttctctccatcgccttgtctgtggggtgcactggaatagccaggtctggctgggtcggcacaacctgtttgagcctgaagacacaggccagagggtccctgtcagccacagcttcccacacccgctctacaatatgagccttctgaagcatcaaagccttagaccagatgaagactccagccatgacctcatgctgctccgcctgtcagagcctgccaagatcacagatgttgtgaaggtcctgggcctgcccacccaggagccagcactggggaccacctgctacgcctcaggctggggcagcatcgaaccagaggagtgagtcttcagtgtgtgagcctccatctcctgtccaatgacatgtgtgctagagcttactctgagaaggtgacagagttcatgttgtgtgctgggctctggacaggtggtaaagacacttgtggggtgagtcatccctactcccaacatctggaggggaaaggtgagtgaagaccctaattctgggctgcaatctgaaagctaaccagacatctgcctcccctgctccccagctatagccacgccccctccccatgcctcatctgccgccctccttcccccttccctgactccctcaacacaagaggtgattctcacagcataattcacccattcctgtgttgagcacatgcttactgggcacctgctacgtgacca

SEQ ID NO: 61 - DNA, 892 bp, Homo sapiens
  source 1..892: mol_type = genomic DNA
aaactcaccacctggccgtggacacctgtgtcagcatgtgggacctggttctctccatcgccttgtctgtggggtgcactggaatagccaggtctggctgggtcggcacaacctgtttgagcctgaagacacaggccagagggtccctgtcagccacagcttcccacacccgctctacaatatgagccttctgaagcatcaaagccttagaccagatgaagactccagccatgacctcatgctgctccgcctgtcagagcctgccaagatcacagatgttgtgaaggtcctgggcctgcccacccaggagccagcactggggaccacctgctacgcctcaggctggggcagcatcgaaccagaggagttcttgcgccccaggagtcttcagtgtgtgagcctccatctcctgtccaatgacatgtgtgctagagcttactctgagaaggtgacagagttcatgttgtgtgctgggctctggacaggtggtaaagacacttgtgggggtgattctgggggtccacttgtctgtaatggtgtgcttcaaggtatcacatcatggggccctgagccatgtgccctgcctgaaaagcctgctgtgtacaccaaggtggtgcattaccggaagtggatcaaggacaccatcgcagccaacccctgagtgcccctgtcccacccctacctctagtaaatttaagtccacctcacgttctggcatcacttggcctttctggatgctggacacctgaagcttggaactcacctggccgaagctcgagcctcctgagtcctactgacctgtgctttctggtgtggagtccagggctgctaggaaaaggaatgggcagacacaggtgtatgccaatgtttctgaaatgggtataatttcgtc

SEQ ID NO: 62 - DNA, 2829 bp, Homo sapiens
  source 1..2829: mol_type = genomic DNA
aaactcaccacctggccgtggacacctgtgtcagcatgtgggacctggttctctccatcgccttgtctgtggggtgcactggtgccgtgcccctcatccagtctcggattgtgggaggctgggagtgtgagaagcattcccaaccctggcaggtggctgtgtacagtcatggatgggcacactgtgggggtgtcctggtgcacccccagtgggtgctcacagctgcccattgcctaaagaagaatagccaggtctggctgggtcggcacaacctgtttgagcctgaagacacaggccagagggtccctgtcagccacagcttcccacacccgctctacaatatgagccttctgaagcatcaaagccttagaccagatgaagactccagccatgacctcatgctgctccgcctgtcagagcctgccaagatcacagatgttgtgaaggtcctgggcctgcccacccaggagccagcactggggaccacctgctacgcctcaggctggggcagcatcgaaccagaggagttcttgcgccccaggagtcttcagtgtgtgagcctccatctcctgtccaatgacatgtgtgctagagcttactctgagaaggtgacagagttcatgttgtgtgctgggctctggacaggtggtaaagacacttgtgggggtgattctgggggtccacttgtctgtaatggtgtgcttcaaggtatcacatcatggggccctgagccatgtgccctgcctgaaaagcctgctgtgtacaccaaggtggtgcattaccggaagtggatcaaggacaccatcgcagccaacccctgagtgcccctgtcccacccctacctctagtaaatttaagtccacctcacgttctggcatcacttggcctttctggatgctggacacctgaagcttggaactcacctggccgaagctcgagcctcctgagtcctactgacctgtgctttctggtgtggagtccagggctgctaggaaaaggaatgggcagacacaggtgtatgccaatgtttctgaaatgggtataatttcgtcctctccttcggaacactggctgtctctgaagacttctcgctcagtttcagtgaggacacacacaaagacgtgggtgaccatgttgtttgtggggtgcagagatgggaggggtggggcccaccctggaagagtggacagtgacacaaggtggacactctctacagatcactgaggataagctggagccacaatgcatgaggcacacacacagcaaggatgacgctgtaaacatagcccacgctgtcctgggggcactgggaagcctagataaggccgtgagcagaaagaaggggaggatcctcctatgttgttgaaggagggactagggggagaaactgaaagctgattaattacaggaggtttgttcaggtcccccaaaccaccgtcagatttgatgatttcctagcaggacttacagaaataaagagctatcatgctgtggtttattatggtttgttacattgataggatacatactgaaatcagcaaacaaaacagatgtatagattagagtgtggagaaaacagaggaaaacttgcagttacgaagactggcaacttggctttactaagttttcagactggcaggaagtcaaacctattaggctgaggaccttgtggagtgtagctgatccagctgatagaggaactagccaggtgggggcctttccctttggatggggggcatatctgacagttattctctccaagtggagacttacggacagcatataattctccctgcaaggatgtatgataatatgtacaaagtaattccaactgaggaagctcacctgatccttagtgtccagggtttttactgggggtctgtaggacgagtatggagtacttgaataattgacctgaagtcctcagacctgaggttccctagagttcaaacagatacagcatggtccagagtcccagatgtacaaaaacagggattcatcacaaatcccatctttagcatgaagggtctggcatggcccaaggccccaagtatatcaaggcacttgggcagaacatgccaaggaatcaaatgtcatctcccaggagttattcaagggtgagccctttacttgggatgtacaggctttgagcagtgcagggctgctgagtcaaccttttattgtacaggggatgagggaaagggagaggatgaggaagcccccctggggatttggtttggtcttgtgatcaggtggtctatggggctatccctacaaagaagaatccagaaataggggcacattgaggaatgatactgagcccaaagagcattcaatcattgttttatttgccttcttttcacaccattggtgagggagggattaccaccctggggttatgaagatggttgaacaccccacacatagcaccggagatatgagatcaacagtttcttagccatagagattcacagcccagagcaggaggacgctgcacaccatgcaggatgacatgggggatgcgctcgggattggtgtgaagaagcaaggactgttagaggcaggctttatagtaacaagacggtggggcaaactctgatttccgtgggggaatgtcatggtcttgctttactaagttttgagactggcaggtagtgaaactcattaggctgagaaccttgtggaatgcagctgacccagctgatagaggaagtagccaggtgggagcctttcccagtgggtgtgggacatatctggcaagattttgtggcactcctggttacagatactggggcagcaaataaaactgaatcttgttttcagacctta

SEQ ID NO: 63 - DNA, 1459 bp, Homo sapiens
  source 1..1459: mol_type = genomic DNA
accacctggccgtggacacctgtgtcagcatgtgggacctggttctctccatcgccttgtctgtggggtgcactggtgccgtgcccctcatccagtctcggattgtgggaggctgggagtgtgagaagcattcccaaccctggcaggtggctgtgtacagtcatggatgggcacactgtgggggtgtcctggtgcacccccagtgggtgctcacagctgcccattgcctaaagaagaatagccaggtctggctgggtcggcacaacctgtttgagcctgaagacacaggccagagggtccctgtcagccacagcttcccacacccgctctacaatatgagccttctgaagcatcaaagccttagaccagatgaagactccagccatgacctcatgctgctccgcctgtcagagcctgccaagatcacagatgttgtgaaggtcctgggcctgcccacccaggagccagcactggggaccacctgctacgcctcaggctggggcagcatcgaaccagaggagtgtacgcctgggccagatggtgtagctgggagcccagatgcctgggtctgagggaagtggggccaaagaaccaggtggggtccggccacagcccagtttttctctgacccatagtcttgcgccccaggagtcttcagtgtgtgagcctccatctcctgtccaatgacatgtgtgctagagcttactctgagaaggtgacagagttcatgttgtgtgctgggctctggacaggtggtaaagacacttgtgggggtgattctgggggtccacttgtctgtaatggtgtgcttcaaggtatcacatcatggggccctgagccatgtgccctgcctgaaaagcctgctgtgtacaccaaggtggtgcattaccggaagtggatcaaggacaccatcgcagccaacccctgagtgcccctgtcccacccctacctctagtaaatttaagtccacctcacgttctggcatcacttggcctttctggatgctggacacctgaagcttggaactcacctggccgaagctcgagcctcctgagtcctactgacctgtgctttctggtgtggagtccagggctgctaggaaaaggaatgggcagacacaggtgtatgccaatgtttctgaaatgggtataatttcgtcctctccttcggaacactggctgtctctgaagacttctcgctcagtttcagtgaggacacacacaaagacgtgggtgaccatgttgtttgtggggtgcagagatgggaggggtggggcccaccctggaagagtggacagtgacacaaggtggacactctctacagatcactgaggataagctggagccacaatgcatgaggcacacacacagcaaggatgacgctgtaaacatagcccacgctgtcctgggggcactgggaagcctagataaggccgtgagcagaaagaaggggaggatcc

SEQ ID NO: 64 - DNA, 1299 bp, Homo sapiens
  source 1..1299: mol_type = genomic DNA
accacctggccgtggacacctgtgtcagcatgtgggacctggttctctccatcgccttgtctgtggggtgcactggaatagccaggtctggctgggtcggcacaacctgtttgagcctgaagacacaggccagagggtccctgtcagccacagcttcccacacccgctctacaatatgagccttctgaagcatcaaagccttagaccagatgaagactccagccatgacctcatgctgctccgcctgtcagagcctgccaagatcacagatgttgtgaaggtcctgggcctgcccacccaggagccagcactggggaccacctgctacgcctcaggctggggcagcatcgaaccagaggagtgtacgcctgggccagatggtgtagctgggagcccagatgcctgggtctgagggaagtggggccaaagaaccaggtggggtccggccacagcccagtttttctctgacccatagtcttgcgccccaggagtcttcagtgtgtgagcctccatctcctgtccaatgacatgtgtgctagagcttactctgagaaggtgacagagttcatgttgtgtgctgggctctggacaggtggtaaagacacttgtgggggtgattctgggggtccacttgtctgtaatggtgtgcttcaaggtatcacatcatggggccctgagccatgtgccctgcctgaaaagcctgctgtgtacaccaaggtggtgcattaccggaagtggatcaaggacaccatcgcagccaacccctgagtgcccctgtcccacccctacctctagtaaatttaagtccacctcacgttctggcatcacttggcctttctggatgctggacacctgaagcttggaactcacctggccgaagctcgagcctcctgagtcctactgacctgtgctttctggtgtggagtccagggctgctaggaaaaggaatgggcagacacaggtgtatgccaatgtttctgaaatgggtataatttcgtcctctccttcggaacactggctgtctctgaagacttctcgctcagtttcagtgaggacacacacaaagacgtgggtgaccatgttgtttgtggggtgcagagatgggaggggtggggcccaccctggaagagtggacagtgacacaaggtggacactctctacagatcactgaggataagctggagccacaatgcatgaggcacacacacagcaaggatgacgctgtaaacatagcccacgctgtcctgggggcactgggaagcctagataaggccgtgagcagaaagaaggggaggatcc

SEQ ID NO: 65 - DNA, 2847 bp, Homo sapiens
  source 1..2847: mol_type = genomic DNA
ggacacctgtgtcagcatgtgggacctggttctctccatcgccttgtctgtggggtgcactggtgccgtgcccctcatccagtctcggattgtgggaggctgggagtgtgagaagcattcccaaccctggcaggtggctgtgtacagtcatggatgggcacactgtgggggtgtcctggtgcacccccagtgggtgctcacagctgcccattgcctaaagaagaatagccaggtctggctgggtcggcacaacctgtttgagcctgaagacacaggccagagggtccctgtcagccacagcttcccacacccgctctacaatatgagccttctgaagcatcaaagccttagaccagatgaagactccagccatgacctcatgctgctccgcctgtcagagcctgccaagatcacagatgttgtgaaggtcctgggcctgcccacccaggagccagcactggggaccacctgctacgcctcaggctggggcagcatcgaaccagaggagttcttgcgccccaggagtcttcagtgtgtgagcctccatctcctgtccaatgacatgtgtgctagagcttactctgagaaggtgacagagttcatgttgtgtgctgggctctggacaggtggtaaagacacttgtggggtgagtcatccctactcccaacatctggaggggaaagggtgattctgggggtccacttgtctgtaatggtgtgcttcaaggtatcacatcatggggccctgagccatgtgccctgcctgaaaagcctgctgtgtacaccaaggtggtgcattaccggaagtggatcaaggacaccatcgcagccaacccctgagtgcccctgtcccacccctacctctagtaaatttaagtccacctcacgttctggcatcacttggcctttctggatgctggacacctgaagcttggaactcacctggccgaagctcgagcctcctgagtcctactgacctgtgctttctggtgtggagtccagggctgctaggaaaaggaatgggcagacacaggtgtatgccaatgtttctgaaatgggtataatttcgtcctctccttcggaacactggctgtctctgaagacttctcgctcagtttcagtgaggacacacacaaagacgtgggtgaccatgttgtttgtggggtgcagagatgggaggggtggggcccaccctggaagagtggacagtgacacaaggtggacactctctacagatcactgaggataagctggagccacaatgcatgaggcacacacacagcaaggatgacgctgtaaacatagcccacgctgtcctgggggcactgggaagcctagataaggccgtgagcagaaagaaggggaggatcctcctatgttgttgaaggagggactagggggagaaactgaaagctgattaattacaggaggtttgttcaggtcccccaaaccaccgtcagatttgatgatttcctagcaggacttacagaaataaagagctatcatgctgtggtttattatggtttgttacattgataggatacatactgaaatcagcaaacaaaacagatgtatagattagagtgtggagaaaacagaggaaaacttgcagttacgaagactggcaacttggctttactaagttttcagactggcaggaagtcaaacctattaggctgaggaccttgtggagtgtagctgatccagctgatagaggaactagccaggtgggggcctttccctttggatggggggcatatctgacagttattctctccaagtggagacttacggacagcatataattctccctgcaaggatgtatgataatatgtacaaagtaattccaactgaggaagctcacctgatccttagtgtccagggtttttactgggggtctgtaggacgagtatggagtacttgaataattgacctgaagtcctcagacctgaggttccctagagttcaaacagatacagcatggtccagagtcccagatgtacaaaaacagggattcatcacaaatcccatctttagcatgaagggtctggcatggcccaaggccccaagtatatcaaggcacttgggcagaacatgccaaggaatcaaatgtcatctcccaggagttattcaagggtgagccctttacttgggatgtacaggctttgagcagtgcagggctgctgagtcaaccttttattgtacaggggatgagggaaagggagaggatgaggaagcccccctggggatttggtttggtcttgtgatcaggtggtctatggggctatccctacaaagaagaatccagaaataggggcacattgaggaatgatactgagcccaaagagcattcaatcattgttttatttgccttcttttcacaccattggtgagggagggattaccaccctggggttatgaagatggttgaacaccccacacatagcaccggagatatgagatcaacagtttcttagccatagagattcacagcccagagcaggaggacgctgcacaccatgcaggatgacatgggggatgcgctcgggattggtgtgaagaagcaaggactgttagaggcaggctttatagtaacaagacggtggggcaaactctgatttccgtgggggaatgtcatggtcttgctttactaagttttgagactggcaggtagtgaaactcattaggctgagaaccttgtggaatgcagctgacccagctgatagaggaagtagccaggtgggagcctttcccagtgggtgtgggacatatctggcaagattttgtggcactcctggttacagatactggggcagcaaataaaactgaatcttgttttcagacctta

SEQ ID NO: 66 - DNA, 2834 bp, Homo sapiens
  source 1..2834: mol_type = genomic DNA
ggacacctgtgtcagcatgtgggacctggttctctccatcgccttgtctgtggggtgcactggtgccgtgcccctcatccagtctcggattgtgggaggctgggagtgtgagaagcattcccaaccctggcaggtggctgtgtacagtcatggatgggcacactgtgggggtgtcctggtgcacccccagtgggtgctcacagctgcccattgcctaaagaagaatagccaggtctggctgggtcggcacaacctgtttgagcctgaagacacaggccagagggtccctgtcagccacagcttcccacacccgctctacaatatgagccttctgaagcatcaaagccttagaccagatgaagactccagccatgacctcatgctgctccgcctgtcagagcctgccaagatcacagatgttgtgaaggtcctgggcctgcccacccaggagccagcactggggaccacctgctacgcctcaggctggggcagcatcgaaccagaggagtgagtcttcagtgtgtgagcctccatctcctgtccaatgacatgtgtgctagagcttactctgagaaggtgacagagttcatgttgtgtgctgggctctggacaggtggtaaagacacttgtggggtgagtcatccctactcccaacatctggaggggaaagggtgattctgggggtccacttgtctgtaatggtgtgcttcaaggtatcacatcatggggccctgagccatgtgccctgcctgaaaagcctgctgtgtacaccaaggtggtgcattaccggaagtggatcaaggacaccatcgcagccaacccctgagtgcccctgtcccacccctacctctagtaaatttaagtccacctcacgttctggcatcacttggcctttctggatgctggacacctgaagcttggaactcacctggccgaagctcgagcctcctgagtcctactgacctgtgctttctggtgtggagtccagggctgctaggaaaaggaatgggcagacacaggtgtatgccaatgtttctgaaatgggtataatttcgtcctctccttcggaacactggctgtctctgaagacttctcgctcagtttcagtgaggacacacacaaagacgtgggtgaccatgttgtttgtggggtgcagagatgggaggggtggggcccaccctggaagagtggacagtgacacaaggtggacactctctacagatcactgaggataagctggagccacaatgcatgaggcacacacacagcaaggatgacgctgtaaacatagcccacgctgtcctgggggcactgggaagcctagataaggccgtgagcagaaagaaggggaggatcctcctatgttgttgaaggagggactagggggagaaactgaaagctgattaattacaggaggtttgttcaggtcccccaaaccaccgtcagatttgatgatttcctagcaggacttacagaaataaagagctatcatgctgtggtttattatggtttgttacattgataggatacatactgaaatcagcaaacaaaacagatgtatagattagagtgtggagaaaacagaggaaaacttgcagttacgaagactggcaacttggctttactaagttttcagactggcaggaagtcaaacctattaggctgaggaccttgtggagtgtagctgatccagctgatagaggaactagccaggtgggggcctttccctttggatggggggcatatctgacagttattctctccaagtggagacttacggacagcatataattctccctgcaaggatgtatgataatatgtacaaagtaattccaactgaggaagctcacctgatccttagtgtccagggtttttactgggggtctgtaggacgagtatggagtacttgaataattgacctgaagtcctcagacctgaggttccctagagttcaaacagatacagcatggtccagagtcccagatgtacaaaaacagggattcatcacaaatcccatctttagcatgaagggtctggcatggcccaaggccccaagtatatcaaggcacttgggcagaacatgccaaggaatcaaatgtcatctcccaggagttattcaagggtgagccctttacttgggatgtacaggctttgagcagtgcagggctgctgagtcaaccttttattgtacaggggatgagggaaagggagaggatgaggaagcccccctggggatttggtttggtcttgtgatcaggtggtctatggggctatccctacaaagaagaatccagaaataggggcacattgaggaatgatactgagcccaaagagcattcaatcattgttttatttgccttcttttcacaccattggtgagggagggattaccaccctggggttatgaagatggttgaacaccccacacatagcaccggagatatgagatcaacagtttcttagccatagagattcacagcccagagcaggaggacgctgcacaccatgcaggatgacatgggggatgcgctcgggattggtgtgaagaagcaaggactgttagaggcaggctttatagtaacaagacggtggggcaaactctgatttccgtgggggaatgtcatggtcttgctttactaagttttgagactggcaggtagtgaaactcattaggctgagaaccttgtggaatgcagctgacccagctgatagaggaagtagccaggtgggagcctttcccagtgggtgtgggacatatctggcaagattttgtggcactcctggttacagatactggggcagcaaataaaactgaatcttgttttcagacctta

SEQ ID NO: 67 - DNA, 1307 bp, Homo sapiens
  source 1..1307: mol_type = genomic DNA
atgtgggacctggttctctccatcgccttgtctgtggggtgcactggtgagattggggggataaaggaaggggggcgggttctgactcttatgctgaagcccttttcctcccacccagtgccccagcctcgtcccttcagcccacagttcagcccagacaatgtgcccctgactcttccacattgcaatagtcctcatgcccacactaggtccccgctccctcccacttacctcagacctttctctccattgcccagccaaatccctgctcccagctgctttactaaagagcaagttcctgggcatctctgtgtttctctttatggggttcaaaacctttcaaggacctctctccatgccactggttccttggaccctatcactgggctgcctcctgagcccctcagtcctaccacagtctactgacttttcctattcagctgtgagcattcaaccctgtcccctggaccttgacacctggctccccaaccctgtcccaggaaacccagattccaccagacacttccttcttccccccgaggctatctggcctgagacaacaaatgctgcctcccaccctgagtctggcactgggactttcagaactcctccttccctgactctttgccccagacccgtcattcaatggctagctttttccatgggaaaaacacgagcacccccaaccacaacggccagttctctgattccctaaatccgcacccttttcaaaacctcaaaaacaaaacaaaacaaaacaaagcaagaaacaactcaggcagaactgtttgcttaaccttggacatggtaaaccatccaaaaccttcctctcccagcaactaaacctctccactgggcacttatccttggtttctggaacctcttattctcttagaacccacagctgccaccacagtgtcccttctcccagtgtaagaccccaaatcactccaaatgacccaacccccaacccgatgcctgcttcagatgtttcccatgtcccctactctgatctctggggtcagctccgttctcagagcatgaagcctcccgacctggtccagccaccaacccgctaacgcagggaatagctacagaattgccagccctcccaggaccccttgcttgtgtcctggactcccagtcctggtcctctgcccccatgtctcttcaaacccacagctcagctccctcccctatccaattcttttgggtctgatccccctgacccagcaccccctccgcaggtgccgtgcccctcatccagtctcggattgtgggaggctgggagtgtgagaagcattccc

SEQ ID NO: 68 - DNA, 528 bp, Homo sapiens
  source 1..528: mol_type = genomic DNA
acaaaaagtagccaggcgtggtgctgcgcgcctgtaatcccaattactagggaggctgaggcaggagaatcgcttgaacccgggagggagaggttgcagtgagccgagatcgtgccactgcactccagcctgggtgacagagcaagactccatctcagaaaaaacaaacaaacaaacaaacaacaaaaaaaatcgaaaggaggggaagggagctggagagagaaagggggacgtggccctgagctgtgggccgggccacccgccactacagagccctcactccagccccagctgcaggaatagccaggtctggctgggtcggcacaacctgtttgagcctgaagacacaggccagagggtccctgtcagccacagcttcccacacccgctctacaatatgagccttctgaagcatcaaagccttagaccagatgaagactccagccatgacctcatgctgctccgcctgtcagagcctgccaagatcacagatgttgtgaaggtcctgggcctgcccacccaggagcc

SEQ ID NO: 69 - DNA, 1677 bp, Homo sapiens
  source 1..1677: mol_type = genomic DNA
tatcacccctggcttcctctctgctgtttctccttctctctctgacttcccgcatccttttctcatttgtctatttctcactcccttcctggttctgttctttctcccttcctcttccccatgtctatttcttgctgtctctgtctcttctttgctcatcctaattctcactgttctcccttctgtttttgtcattcctctgccattttatgctctctcttttccacttcgtttctttcagtttctgtctctgcctctcacatgatcacactcctgttttctaactcactgtctgtatttcaccacgactatatctccccgacccctgtgcttttctcactgtttctttttcttccctttggagtctcccttatcctcccctgccccatctacctttccccattttctctctcctcatgcatccacccccttcctccccaggaatagccaggtctggctgggtcggcacaacctgtttgagcctgaagacacaggccagagggtccctgtcagccacagcttcccacacccgctctacaatatgagccttctgaagcatcaaagccttagaccagatgaagactccagccatgacctcatgctgctccgcctgtcagagcctgccaagatcacagatgttgtgaaggtcctgggcctgcccacccaggagccagcactggggaccacctgctacgcctcaggctggggcagcatcgaaccagaggagttcttgcgccccaggagtcttcagtgtgtgagcctccatctcctgtccaatgacatgtgtgctagagcttactctgagaaggtgacagagttcatgttgtgtgctgggctctggacaggtggtaaagacacttgtgggggtgattctgggggtccacttgtctgtaatggtgtgcttcaaggtatcacatcatggggccctgagccatgtgccctgcctgaaaagcctgctgtgtacaccaaggtggtgcattaccggaagtggatcaaggacaccatcgcagccaacccctgagtgcccctgtcccacccctacctctagtaaatttaagtccacctcacgttctggcatcacttggcctttctggatgctggacacctgaagcttggaactcacctggccgaagctcgagcctcctgagtcctactgacctgtgctttctggtgtggagtccagggctgctaggaaaaggaatgggcagacacaggtgtatgccaatgtttctgaaatgggtataatttcgtcctctccttcggaacactggctgtctctgaagacttctcgctcagtttcagtgaggacacacacaaagacgtgggtgaccatgttgtttgtggggtgcagagatgggaggggtggggcccaccctggaagagtggacagtgacacaaggtggacactctctacagatcactgaggataagctggagccacaatgcatgaggcacacacacagcaaggatgacgctgtaaacatagcccacgctgtcctgggggcactgggaagcctagataaggccgtgagcagaaagaaggggaggatcctcctatgttgttgaaggagggactagggggagaaactgaaagctgattaattacaggaggtttgttcaggtcccccaaaccaccgtcagatttgatgatttcctagcaggacttacagaaataaa

SEQ ID NO: 70 - DNA, 1037 bp, Homo sapiens
  source 1..1037: mol_type = genomic DNA
ttttccacttcgtttctttcagtttctgtctctgcctctcacatgatcacactcctgttttctaactcactgtctgtatttcaccacgactatatctccccgacccctgtgcttttctcactgtttctttttcttccctttggagtctcccttatcctcccctgccccatctacctttccccattttctctctcctcatgcatccacccccttcctccccaggaatagccaggtctggctgggtcggcacaacctgtttgagcctgaagacacaggccagagggtccctgtcagccacagcttcccacacccgctctacaatatgagccttctgaagcatcaaagccttagaccagatgaagactccagccatgacctcatgctgctccgcctgtcagagcctgccaagatcacagatgttgtgaaggtcctgggcctgcccacccaggagccagcactggggaccacctgctacgcctcaggctggggcagcatcgaaccagaggagtgagtcttcagtgtgtgagcctccatctcctgtccaatgacatgtgtgctagagcttactctgagaaggtgacagagttcatgttgtgtgctgggctctggacaggtggtaaagacacttgtggggtgagtcatccctactcccaacatctggaggggaaaggtgagtgaagaccctaattctgggctgcaatctgaaagctaaccagacatctgcctcccctgctccccagctatagccacgccccctccccatgcctcatctgccgccctccttcccccttccctgactccctcaacacaagaggtgattctcacagcataattcacccattcctgtgttgagcacatgcttactgggcacctgctacgtgaccagcattgccgtagaccctgggaagcagcagtgaacaggtagagagcagcctctccctcctgcagcccccatgctggtgaggggcactggcaggaacagtggacccaacatggaaatgctggagggtgtcaggaagtgatcgggctctggggca

SEQ ID NO: 71 - DNA, 550 bp, Homo sapiens
  source 1..550: mol_type = genomic DNA
accagatgaagactccagccatgacctcatgctgctccgcctgtcagagcctgccaagatcacagatgttgtgaaggtcctgggcctgcccacccaggagccagcactggggaccacctgctacgcctcaggctggggcagcatcgaaccagaggagttcttgcgccccaggagtcttcagtgtgtgagcctccatctcctgtccaatgacatgtgtgctagagcttactctgagaaggtgacagagttcatgttgtgtgctgggctctggacaggtggtaaagacacttgtggggagtcaggagctgtggatggtgctggacagaagaaggacagggcctggctcagggtgattctgggggtccacttgtctgtaatggtgtgcttcaaggtatcacatcatggggccctgagccatgtgccctgcctgaaaagcctgctgtgtacaccaaggtggtgcattaccggaagtggatcaaggacaccatcgcagccaacccctgagtgcccctgtcccacccctacctctagtaaatttaagtccacctca

SEQ ID NO: 72 - DNA, 420 bp, Homo sapiens
  source 1..420: mol_type = genomic DNA
ctgagaaggtgacagagttcatgttgtgtgctgggctctggacaggtggtaaagacacttgtgggcataattcacccattcctgtgttgagcacatgcttactgggcacctgctacgtgaccagcattgccgtagaccctgggaagcagcagtgaacagtcaggagctgtggatggtgctggacagaagaaggacagggcctggctcagggtgattctgggggtccacttgtctgtaatggtgtgcttcaaggtatcacatcatggggccctgagccatgtgccctgcctgaaaagcctgctgtgtacaccaaggtggtgcattaccggaagtggatcaaggacaccatcgcagccaacccctgagtgcccctgtcccacccctacctctagtaaatttaagtccacctcacgttctggc

SEQ ID NO: 73 - DNA, 798 bp, Homo sapiens
  source 1..798: mol_type = genomic DNA
ggacatcctgcagaaggtaggagtgagcaaacacccgctgcaggggaggggagagccctgcggcacctgggggagcagagggagcagcacctgcccaggcctgggaggaggggccgggagggcgtgaggaggagcgagggggctgcatggctggagtgagggatcaggggcagggcgcgagatggcctcacacagggaagagagggcccctcctgcagggcctcacctgggccacaggaggacactgcttttcctctgaggagtcaggagctgtggatggtgctggacagaagaaggacagggcctggctcagggtgattctgggggtccacttgtctgtaatggtgtgcttcaaggtatcacatcatggggccctgagccatgtgccctgcctgaaaagcctgctgtgtacaccaaggtggtgcattaccggaagtggatcaaggacaccatcgcagccaacccctgagtgcccctgtcccacccctacctctagtaaatttaagtccacctcacgttctggcatcacttggcctttctggatgctggacacctgaagcttggaactcacctggccgaagctcgagcctcctgagtcctactgacctgtgctttctggtgtggagtccagggctgctaggaaaaggaatgggcagacacaggtgtatgccaatgtttctgaaatgggtataatttcgtcctctccttcggaacactggctgtctctgaagacttctcgctcagtttcagtgaggacacacacaaagacgtgggtgaccatgttgtttgtggggtgca

SEQ ID NO: 74 - DNA, 1069 bp, Homo sapiens
  source 1..1069: mol_type = genomic DNA
ggtctgagtgcagagctgctgtcatggcggccgctctgtggggcttctttcccgtcctgctgctgctgctgctatcgggggatgtccagagctcggaggtgcccggggctgctgctgagggatcgggagggagtggggtcggcataggagatcgcttcaagattgaggggcgtgcagttgttccaggggtgaagcctcaggactggatctcggcggcccgagtgctggtagacggagaagagcacgtcggtttccttaagacagatgggagttttgtggttcatgatataccttctggatcttatgtagtggaagttgtatctccagcttacagatttgatcccgttcgagtggatatcacttcgaaaggaaaaatgagagcaagatatgtgaattacatcaaaacatcagaggttgtcagactgccctatcctctccaaatgaaatcttcaggtccaccttcttactttattaaaagggaatcgtggggctggacagactttctaatgaacccaatggttatgatgatggttcttcctttattgatatttgtgcttctgcctaaagtggtcaacacaagtgatcctgacatgagacgggaaatggagcagtcaatgaatatgctgaattccaaccatgagttgcctgatgtttctgagttcatgacaagactcttctcttcaaaatcatctggcaaatctagcagcggcagcagtaaaacaggcaaaagtggggctggcaaaaggaggtagtcaggccgtccagagctggcatttgcacaaacacggcaacactgggtggcatccaagtcttggaaaaccgtgtgaagcaactactataaacttgagtcatcccgacgttgatctcttacaactgtgtatgttaactttttagcacatgttttgtacttggtacacgagaaaacccagctttcatcttttgtctgtatgaggtcaatattgatgtcactgaattaattacagtgtcctatagaaaatgccattaataaattatatgaactactatacattatgtatattaattaaaacatcttaatccagaaatcaaa

SEQ ID NO: 75 - DNA, 581 bp, Homo sapiens
  source 1..581: mol_type = genomic DNA
cctgctgctgctgctgctatcgggggatgtccagagctcggaggtgcccggggctgctgctgagggatcgggagggagtggggtcggcataggagatcgcttcaagattgaggggcgtgcagttgttccaggggtgaagcctcaggactggatctcggcggcccgagtgctggtagacggagaagagcacgtcggtttccttaaagcaagatatgtgaattacatcaaaacatcagaggttgtcagactgccctatcctctccaaatgaaatcttcaggtccaccttcttactttattaaaagggaatcgtggggctggacagactttctaatgaacccaatggttatgatgatggttcttcctttattgatatttgtgcttctgcctaaagtggtcaacacaagtgatcctgacatgagacgggaaatggagcagtcaatgaatatgctgaattccaaccatgagttgcctgatgtttctgagttcatgacaagactcttctcttcaaaatcatctggcaaatctagcagcggcagcagtaaaacaggcaaaagtggggctggcaaaaggaggtagtcag

SEQ ID NO: 76 - DNA, 506 bp, Homo sapiens
  source 1..506: mol_type = genomic DNA
cctgctgctgctgctgctatcgggggatgtccagagctcggaggacagatgggagttttgtggttcatgatataccttctggatcttatgtagtggaagttgtatctccagcttacagatttgatcccgttcgagtggatatcacttcgaaaggaaaaatgagagcaagatatgtgaattacatcaaaacatcagaggttgtcagactgccctatcctctccaaatgaaatcttcaggtccaccttcttactttattaaaagggaatcgtggggctggacagactttctaatgaacccaatggttatgatgatggttcttcctttattgatatttgtgcttctgcctaaagtggtcaacacaagtgatcctgacatgagacgggaaatggagcagtcaatgaatatgctgaattccaaccatgagttgcctgatgtttctgagttcatgacaagactcttctcttcaaaatcatctggcaaatctagcagcggcagcagtaaaaca

SEQ ID NO: 77 - DNA, 607 bp, Homo sapiens
  source 1..607: mol_type = genomic DNA
ctgtggggcttctttcccgtcctgctgctgctgctgctatcgggggatgtccagagctcggaggtgcccggggctgctgctgagggatcgggagggagtggggtcggcataggagatcgcttcaagattgaggggcgtgcagttgttccaggggtgaagcctcaggactggatctcggcggcccgagtgctggtagacggagaagagcacgtcggtttccttaattgaattcatcgagagatttgctatatcacacttgtcatttatgtgagactagggttcctctacattgctttcttgcttctgtcctttcatgctattagtggaagtgggttttctgtctatattaaaagacaggatgaatttgttagcactagttttgcagcagcctgcttttgaaatgtctaggcacgcgtatgttgttttaaatctttccacccttacttggaggtgaaactgtaaactgaaagcaaataattaggaagtatttcctttggtgggttcgtacaccagcaaatggtatctgaaaatcagacaacttaaatgtagacatttaaatccaaatctgatttacatatttgttcagatcatctaagtgcccttgagt

SEQ ID NO: 78 - DNA, 2131 bp, Homo sapiens
  source 1..2131: mol_type = genomic DNA
agggaggcttcatgacctacacaactgactaaatcattggcctttggtgatcaactcagccttcagcttctctctcctccccaaagtcagggggctgctgaaagttccaaccatctaatcacagtttgaaggatgacctctaggaagaaagtgttgctgaaggttatcatcctgggagattctggagtcgggaagacatcactcatgaaccagtatgtgaataagaaattcagcaatcagtacaaagccacaataggagctgactttctgaccaaggaggtgatggtggatgacaggctagtcacaatgcagatatgggacacagcaggacaggaacggttccagtctctcggtgtggccttctacagaggtgcagactgctgcgttctggtatttgatgtgactgcccccaacacattcaaaaccctagatagctggagagatgagtttctcatccaggccagtccccgagatcctgaaaacttcccatttgttgtgttgggaaacaagattgacctcgaaaacagacaagtggccacaaagcgggcacaggcctggtgctacagcaaaaacaacattccctactttgagaccagtgccaaggaggccatcaacgtggagcaggcgttccagacgattgcacggaatgcacttaagcaggaaacggaggtggagctgtacaacgaatttcctgaacctatcaaactggacaagaatgaccgggccaaggcctcggcagaaagctgcagttgctgagggggcagtgagagttgagcacagagtccttcacaaaccaagaacacacgtaggccttcaacacaattcccctctcctcttccaaacaaaacatacattgatctctcacatccagctgccaaaagaaaaccccatcaaacacagttacaccccacatatctctcacacacacacacacacgcacacacacacacacagatctgacgtaatcaaactccagcccttgcccgtgatggctccttggggtctgcctgcccacccacatgagcccgcgagtatggcagcaggacaagccagcggtggaagtcattctgatatggagttggcattggaagcttattctttttgttcactggagagagagagaactgtttacagttaatctgtgtctaattatctgattttttttattggtcttgtggtctttttaccccccctttcccctccctccttgaaggctaccccttgggaaggctggtgccccatgccccattacaggctcacacccagtctgatcaggctgagttttgtatgtatctatctgttaatgcttgttacttttaactaatcagatctttttacagtatccatttattatgtaatgcttcttagaaaagaatcttatagtacatgttaatatatgcaaccaattaaaatgtataaattagtgtaagaaattcttggattatgtgtttaagtcctgtaatgcaggcctgtaaggtggagggttgaaccctgtttggattgcagagtgttactcagaattgggaaatccagctagcggcagtattctgtacagtagacacaagaattatgtacgccttttatcaaagacttaagagccaaaaagcttttcatctctccagggggaaaactgtctagttcccttctgtgtctaaattttccaaaacgttgatttgcataatacagtggtatgtgcaatggataaattgccgttatttcaaaaattaaaattctcattttctttcttttttttcccccctgctccacacttcaaaactcccgttagatcagcattctactacaagagtgaaaggaaaaccctaacagatctgtcctagtgattttacctttgttctagaaggcgctcctttcagggttgtggtattcttaggttagcggagctttttcctcttttccccacccatctccccaatattgcccattattaattaacctctttctttggttggaaccctggcagttctgctcccttcctaggatctgcccctgcattgtagcttgcttaacggagcacttctcctttttccaaaggtctacattctagggtgtgggctgagttcttctgtaaagagatgaacgcaatgccaataaaattgaacaagaacaatga

SEQ ID NO: 79 - DNA, 2308 bp, Homo sapiens
  source 1..2308: mol_type = genomic DNA
acttccgctcggggcggcggcggtggcggaagtgggagcgggcctggagtcttggccataaagcctgaggcggcggcagcggcggagttggcggcttggagagctcgggagagttccctggaaccagaacttggaccttctcgcttctgtcctccgtttagtctcctcctcggcgggagccctcgcgacgcgcccggcccggagcccccagcgcagcggccgcgtttgaaggatgacctctaggaagaaagtgttgctgaaggttatcatcctgggagattctggagtcgggaagacatcactcatgaaccagtatgtgaataagaaattcagcaatcagtacaaagccacaataggagctgactttctgaccaaggaggtgatggtggatgacaggctagtcacaatgcagatatgggacacagcaggacaggaacggttccagtctctcggtgtggccttctacagaggtgcagactgctgcgttctggtatttgatgtgactgcccccaacacattcaaaaccctagatagctggagagatgagtttctcatccaggccagtccccgagatcctgaaaacttcccatttgttgtgttgggaaacaagattgacctcgaaaacagacaagtggccacaaagcgggcacaggcctggtgctacagcaaaaacaacattccctactttgagaccagtgccaaggaggccatcaacgtggagcaggcgttccagacgattgcacggaatgcacttaagcagagacagggtcttgctctgtcagtcaggctgatacgcagtggtgcaatcatcactcgctataacctccaacttctgggctccagcagtcttcccaccatagcctcctaagtaggaaacggaggtggagctgtacaacgaatttcctgaacctatcaaactggacaagaatgaccgggccaaggcctcggcagaaagctgcagttgctgagggggcagtgagagttgagcacagagtccttcacaaaccaagaacacacgtaggccttcaacacaattcccctctcctcttccaaacaaaacatacattgatctctcacatccagctgccaaaagaaaaccccatcaaacacagttacaccccacatatctctcacacacacacacacacgcacacacacacacacagatctgacgtaatcaaactccagcccttgcccgtgatggctccttggggtctgcctgcccacccacatgagcccgcgagtatggcagcaggacaagccagcggtggaagtcattctgatatggagttggcattggaagcttattctttttgttcactggagagagagagaactgtttacagttaatctgtgtctaattatctgattttttttattggtcttgtggtctttttaccccccctttcccctccctccttgaaggctaccccttgggaaggctggtgccccatgccccattacaggctcacacccagtctgatcaggctgagttttgtatgtatctatctgttaatgcttgttacttttaactaatcagatctttttacagtatccatttattatgtaatgcttcttagaaaagaatcttatagtacatgttaatatatgcaaccaattaaaatgtataaattagtgtaagaaattcttggattatgtgtttaagtcctgtaatgcaggcctgtaaggtggagggttgaaccctgtttggattgcagagtgttactcagaattgggaaatccagctagcggcagtattctgtacagtagacacaagaattatgtacgccttttatcaaagacttaagagccaaaaagcttttcatctctccagggggaaaactgtctagttcccttctgtgtctaaattttccaaaacgttgatttgcataatacagtggtatgtgcaatggataaattgccgttatttcaaaaattaaaattctcattttctttcttttttttcccccctgctccacacttcaaaactcccgttagatcagcattctactacaagagtgaaaggaaaaccctaacagatctgtcctagtgattttacctttgttctagaaggcgctcctttcagggttgtggtattcttaggttagcggagctttttcctcttttccccacccatctccccaatattgcccattattaattaacctctttctttggttggaaccctggcagttctgctcccttcctaggatctgcccctgcattgtagcttgcttaacggagcacttctcctttttccaaaggtctacattctagggtgtgggctgagttcttctgtaaagagatg

SEQ ID NO: 80 - DNA, 3182 bp, Homo sapiens
  source 1..3182: mol_type = genomic DNA
acttccgctcggggcggcggcggtggcggaagtgggagcgggcctggagtcttggccataaagcctgaggcggcggcagcggcggagttggcggcttggagagctcgggagagttccctggaaccagaacttggaccttctcgcttctgtcctccgtttagtctcctcctcggcgggagccctcgcgacgcgcccggcccggagcccccagcgcagcggccgcgtttgaaggatgacctctaggaagaaagtgttgctgaaggttatcatcctgggagattctggagtcgggaagacatcactcatgaaccagtatgtgaataagaaattcagcaatcagtacaaagccacaataggagctgactttctgaccaaggaggtgatggtggatgacaggctagtcacaatgcagatatgggacacagcaggacaggaacggttccagtctctcggtgtggccttctacagaggtgcagactgctgcgttctggtatttgatgtgactgcccccaacacattcaaaaccctagatagctggagagatgagtttctcatccaggccagtccccgagatcctgaaaacttcccatttgttgtgttgggaaacaagattgacctcgaaaacagacaagtaagtaccaacgatgatagatattgtcacagacacctgctccccaggggccttgtgaatttggagggttctctgctaagctcacatggctctaggaggtgctggtgggagtcttcattaccatatgccagcccttcaggccaactgcctttaaggaccgggacccaggtgacctgggttaagtccccatcctgcccccagctggctgtgactttgggccattgtcttggctgtctcagcttcacttccctttctgcactttgaaggagggaattcggttttgtcattctcagtagtgccctcccagtacctccaggccatgcctggatctccatgtgtgcagaatattgctttgggctttgagtaaaattgctgtactgtagtttcaaataccatttctgttggaaacatagactctttgattaattacaactaggtttatttctgaccacagatcttttcttaagtgacttagtccttatctcttggctgaaaatgggctaggggttggggaaggaatgagaatgtgtgagtggcataggtgacatcacactagcagtaatggtgaagggactataaaccttaagaccaagctgctgggcatttcctgtcctgggatctctgaggtcccagtaaacactcttcatttcttcccggactggcttcttactccattcacaaatggcttttaagtataactgagggtcagaaggtatgagctgtagaccgagacaggctttgagctctctagctgaatcctagctatcctgagcatagctagcaggacaagtttggacgggtctgcaggtctcctccaacaccctctttccccatgtctgtgtcctcacctgtactacctgtagacgaggggccatgacacttcctggggaggatggagtcagtgctggctgcttctgtcatgagcctatgtgcaccctgcttcttctttcaggtggccacaaagcgggcacaggcctggtgctacagcaaaaacaacattccctactttgagaccagtgccaaggaggccatcaacgtggagcaggcgttccagacgattgcacggaatgcacttaagcaggaaacggaggtggagctgtacaacgaatttcctgaacctatcaaactggacaagaatgaccgggccaaggcctcggcagaaagctgcagttgctgagggggcagtgagagttgagcacagagtccttcacaaaccaagaacacacgtaggccttcaacacaattcccctctcctcttccaaacaaaacatacattgatctctcacatccagctgccaaaagaaaaccccatcaaacacagttacaccccacatatctctcacacacacacacacacgcacacacacacacacagatctgacgtaatcaaactccagcccttgcccgtgatggctccttggggtctgcctgcccacccacatgagcccgcgagtatggcagcaggacaagccagcggtggaagtcattctgatatggagttggcattggaagcttattctttttgttcactggagagagagagaactgtttacagttaatctgtgtctaattatctgattttttttattggtcttgtggtctttttaccccccctttcccctccctccttgaaggctaccccttgggaaggctggtgccccatgccccattacaggctcacacccagtctgatcaggctgagttttgtatgtatctatctgttaatgcttgttacttttaactaatcagatctttttacagtatccatttattatgtaatgcttcttagaaaagaatcttatagtacatgttaatatatgcaaccaattaaaatgtataaattagtgtaagaaattcttggattatgtgtttaagtcctgtaatgcaggcctgtaaggtggagggttgaaccctgtttggattgcagagtgttactcagaattgggaaatccagctagcggcagtattctgtacagtagacacaagaattatgtacgccttttatcaaagacttaagagccaaaaagcttttcatctctccagggggaaaactgtctagttcccttctgtgtctaaattttccaaaacgttgatttgcataatacagtggtatgtgcaatggataaattgccgttatttcaaaaattaaaattctcattttctttcttttttttcccccctgctccacacttcaaaactcccgttagatcagcattctactacaagagtgaaaggaaaaccctaacagatctgtcctagtgattttacctttgttctagaaggcgctcctttcagggttgtggtattcttaggttagcggagctttttcctcttttccccacccatctccccaatattgcccattattaattaacctctttctttggttggaaccctggcagttctgctcccttcctaggatctgcccctgcattgtagcttgcttaacggagcacttctcctttttccaaaggtctacattctagggtgtgggctgagttcttctgtaaagagatgaacgcaatgccaataaaattgaacaagaacaatg

SEQ ID NO: 81 - DNA, 2985 bp, Homo sapiens
  source 1..2985: mol_type = genomic DNA
acttccgctcggggcggcggcggtggcggaagtgggagcgggcctggagtcttggccataaagcctgaggcggcggcagcggcggagttggcggcttggagagctcgggagagttccctggaaccagaacttggaccttctcgcttctgtcctccgtttagtctcctcctcggcgggagccctcgcgacgcgcccggcccggagcccccagcgcagcggccgcgtttgaaggatgacctctaggaagaaagtgttgctgaaggttatcatcctgggagattctggagtcgggaagacatcactcatgaaccagtatgtgaataagaaattcagcaatcagtacaaagccacaataggagctgactttctgaccaaggaggtgatggtggatgacaggctagtcacaatgcagatatgggacacagcaggacaggaacggttccagtctctcggtgtggccttctacagaggtgcagactgctgcgttctggtatttgatgtgactgcccccaacacattcaaaaccctagatagctggagagatgagtttctcatccaggccagtccccgagatcctgaaaacttcccatttgttgtgttgggaaacaagattgacctcgaaaacagacaagtggccacaaagcgggcacaggcctggtgctacagcaaaaacaacattccctactttgagaccagtgccaaggaggccatcaacgtggagcaggcgttccagacgattgcacggaatgcacttaagcagtgccatggatttccttggtctgggtgtgttgaagcctcacccaatgatcggagtgtgtggccagggtggagaagcatacagcgctggatgctctcagcagaggcctttggcccagagcttctgtagaagcaggcagggagcctgcacttcccgccttccaccacccatggctctggacaatgacacactgggcaagacatacatatatcagtgggcacagaagatctctttctgtttctgctcagggtgtttctgtgtaggaaaagaaatcccatctttcttcattgaagcccaaaaccagcagaactgctcttccacctggcccttctagtatgtgaacttggttcctgtaggaagctgtggctctactgtcccctccagaggccacaccaaggtctggaggaggcaggggctccctggaatgatgggacccctgagccactgtgtctacatggggtgctgggttatggacagaggcaggttgctaatttgcacatagaccaaccagagaaggcctgagaaggggttgcagctgttctgggctgtgtttggaaacctacggctgagtgtggcagttgccaggaacgggccctgcaagccaggctgtgaccctgctgctccattctcctgctctctgggttccttggtgctaggaggagccttctggatgccttccaggcttgggacagaaagtcaagggaagaagaatgtaccctggtagccagcctggcagtggcgagtggctccagtggggagaggcccagggactggggctggattccaggatccattcggcaaaggatttctggccagccgctaccctcagagagcagttatgaaggaaaaccaggtcctgaagctgatgcctgccccacaggagcgcacagactcagagccagacagccctgtcaatggggagggacctctgtggcactcagggctgcagccacagacagagaccgtgtccatggggcgtgcagtggaggcttgccgcagtcacaggcagcacaagctggaaactgcaccagttacaggcctgcaggccagccctgagctgccggtgggttttaagtcctgcagtttttctttaatctgaagttttatggctccaatgttcaaaacacacacacacacacacacacacacacacacacacacacacacacacacacgagatgacgcataaaaaatgctgatgcccacatctcttcaaaccgtcttgcagccccaggcccccattctccttgctgcagcaactggagccgctggtgctcccaggcagggccaccgcacctccagcaccggctcctcacctcctgcctctcaggcagatttagatcatctccctggccaggtaggcctgcaagcctgtggcccctgggagagagagaatgtattagtcagggttctctagagggacataactaataggatatatgtatatatgaaagggagtttattaaagagaattgactcacacaatcacaaagcaaagtcccacaataggccatctgcaagctgaggaagaaagaagccaatagtagatcagtccaagtccaaaagcctcaaaagcagggaagctgacagtgcggacttcagtctgtggccaaaggcccgagagcccctggcaaaccactcgtgtaactccaagagtccaaaggccaaagaacctggagtctgatgtccaagggcaggaagcatccagaacagaagaaagatgaaagccagaagactcagcaagccaacttatcccaccttctgcctgttttgttctagccacactggcagctgttagatggtgtccacccacattgagggtgggtctgccactcacagtccacggactcaaattttaatctcctctggcaacaccctcacagacacacccaggaacaagtttaccagctatctaggcatccttcaatctgatcaggttgatatattaacatcacaagtccttgtcaacttgaaccccttgtcaacttgaacccatacacatctcctgaaatcatatttaatctccaaataaaggaaataataaggtcataattacacctaacgtaatacagctatccttcatacaaccagaagcacactaatccttaacctaaatgctattacataaagttaacaacatttaaatgctgatataaaatcaataaatcttatgtcacatgataatggaaaaagaaaggaaattaatgaagatgttttcttagtacaag

SEQ ID NO: 82 - DNA, 1217 bp, Homo sapiens
  source 1..1217: mol_type = genomic DNA
ggtggcggaagtgggagcgggcctggagtcttggccataaagcctgaggcggcggcagcggcggagttggcggcttggagagctcgggagagttccctggaaccagaacttggaccttctcgcttctgtcctccgtttagtctcctcctcggcgggagccctcgcgacgcgcccggcccggagcccccagcgcagcggccgcgtttgaaggatgacctctaggaagaaagtgttgctgaaggttatcatcctgggagattctggagtcgggaagacatcactcatgaaccagtatgtgaataagaaattcagcaatcagtacaaagccacaataggagctgactttctgaccaaggaggtgatggtggatgacaggctagtcacaatgcagatatgggacacagcaggacaggaacggttccagtctctcggtgtggccttctacagaggtgcagactgctgcgttctggtatttgatgtgactgcccccaacacattcaaaaccctagatagctggagagatgagtttctcatccaggccagtccccgagatcctgaaaacttcccatttgttgtgttgggaaacaagattgacctcgaaaacagacaagtaagtaccaacgatgatagatattcgggcacaggcctggtgctacagcaaaaacaacattccctactttgagaccagtgccaaggaggccatcaacgtggagcaggcgttccagacgattgcacggaatgcacttaagcaggaaacggaggtggagctgtacaacgaatttcctgaacctatcaaactggacaagaatgaccgggccaaggcctcggcagaaagctgcagttgctgagggggcagtgagagttgagcacagagtccttcacaaaccaagaacacacgtaggccttcaacacaattcccctctcctcttccaaacaaaacatacattgatctctcacatccagctgccaaaagaaaaccccatcaaacacagttacaccccacatatctctcacacacacacacacacgcacacacacacacacagatctgacgtaatcaaactccagcccttgcccgtgatggctccttggggtctgcctgcccacccacatgagcccgcgagtatggcagcaggacaagccagcggtggaagtcattctgatatggagttggcattggaagcttattctttttgttcactggagagagagagaac

SEQ ID NO: 83 - DNA, 2360 bp, Homo sapiens
  source 1..2360: mol_type = genomic DNA
ggaagtgggagcgggcctggagtcttggccataaagcctgaggcggcggcagcggcggagttggcggcttggagagctcgggagagttccctggaaccagaacttggaccttctcgcttctgtcctccgtttagtctcctcctcggcgggagccctcgcgacgcgcccggcccggagcccccagcgcagcggccgcgatgaagaaggtgatgactgcaggcgaataaaggaagatgccagcttttgatttgttatgagaaacattgtacttgaaagaaagaattgtttcatcgttcaaatactggtaccaatactggtagtttcgctctgaggagcttcttccgatgcacactgtttgaaggatgacctctaggaagaaagtgttgctgaaggttatcatcctgggagattctggagtcgggaagacatcactcatgaaccagtatgtgaataagaaattcagcaatcagtacaaagccacaataggagctgactttctgaccaaggaggtgatggtggatgacaggctagtcacaatgcagatatgggacacagcaggacaggaacggttccagtctctcggtgtggccttctacagaggtgcagactgctgcgttctggtatttgatgtgactgcccccaacacattcaaaaccctagatagctggagagatgagtttctcatccaggccagtccccgagatcctgaaaacttcccatttgttgtgttgggaaacaagattgacctcgaaaacagacaagtggccacaaagcgggcacaggcctggtgctacagcaaaaacaacattccctactttgagaccagtgccaaggaggccatcaacgtggagcaggcgttccagacgattgcacggaatgcacttaagcaggaaacggaggtggagctgtacaacgaatttcctgaacctatcaaactggacaagaatgaccgggccaaggcctcggcagaaagctgcagttgctgagggggcagtgagagttgagcacagagtccttcacaaaccaagaacacacgtaggccttcaacacaattcccctctcctcttccaaacaaaacatacattgatctctcacatccagctgccaaaagaaaaccccatcaaacacagttacaccccacatatctctcacacacacacacacacgcacacacacacacacagatctgacgtaatcaaactccagcccttgcccgtgatggctccttggggtctgcctgcccacccacatgagcccgcgagtatggcagcaggacaagccagcggtggaagtcattctgatatggagttggcattggaagcttattctttttgttcactggagagagagagaactgtttacagttaatctgtgtctaattatctgattttttttattggtcttgtggtctttttaccccccctttcccctccctccttgaaggctaccccttgggaaggctggtgccccatgccccattacaggctcacacccagtctgatcaggctgagttttgtatgtatctatctgttaatgcttgttacttttaactaatcagatctttttacagtatccatttattatgtaatgcttcttagaaaagaatcttatagtacatgttaatatatgcaaccaattaaaatgtataaattagtgtaagaaattcttggattatgtgtttaagtcctgtaatgcaggcctgtaaggtggagggttgaaccctgtttggattgcagagtgttactcagaattgggaaatccagctagcggcagtattctgtacagtagacacaagaattatgtacgccttttatcaaagacttaagagccaaaaagcttttcatctctccagggggaaaactgtctagttcccttctgtgtctaaattttccaaaacgttgatttgcataatacagtggtatgtgcaatggataaattgccgttatttcaaaaattaaaattctcattttctttcttttttttcccccctgctccacacttcaaaactcccgttagatcagcattctactacaagagtgaaaggaaaaccctaacagatctgtcctagtgattttacctttgttctagaaggcgctcctttcagggttgtggtattcttaggttagcggagctttttcctcttttccccacccatctccccaatattgcccattattaattaacctctttctttggttggaaccctggcagttctgctcccttcctaggatctgcccctgcattgtagcttgcttaacggagcacttctcctttttccaaaggtctacattctagggtgtgggctgagttcttctgtaaagagatgaacgcaatgccaataaaattgaacaagaacaatg

SEQ ID NO: 84 - DNA, 505 bp, Homo sapiens
  source 1..505: mol_type = genomic DNA
agtcttggccataaagcctgaggcggcggcagcggcggagttggcggcttggagagctcgggagagttccctggaaccagaacttggaccttctcgcttctgtcctccgtttagtctcctcctcggcgggagccctcgcgacgcgcccggcccggagcccccagcgcagcggccgcgtttgaaggatgacctctaggaagaaagtgttgctgaaggttatcatcctgggagattctggagtcgggaagacatcactcatgaaccagtatgtgaataagaaattcagcaatcagtacaaagccacaataggagctgactttctgaccaaggaggccatcaacgtggagcaggcgttccagacgattgcacggaatgcacttaagcaggaaacggaggtggagctgtacaacgaatttcctgaacctatcaaactggacaagaatgaccgggccaaggcctcggcagaaagctgcagttgctgagggggcagtgagagttgagcaca

SEQ ID NO: 85 - DNA, 2122 bp, Homo sapiens
  source 1..2122: mol_type = genomic DNA
agtcttggccataaagcctgaggcggcggcagcggcggagttggcggcttggagagctcgggagagttccctggaaccagaacttggaccttctcgcttctgtcctccgtttagtctcctcctcggcgggagccctcgcgacgcgcccggcccggagcccccagcgcagcggccgcgagtcgggaagacatcactcatgaaccagtatgtgaataagaaattcagcaatcagtacaaagccacaataggagctgactttctgaccaaggaggtgatggtggatgacaggctagtcacaatgcagatatgggacacagcaggacaggaacggttccagtctctcggtgtggccttctacagaggtgcagactgctgcgttctggtatttgatgtgactgcccccaacacattcaaaaccctagatagctggagagatgagtttctcatccaggccagtccccgagatcctgaaaacttcccatttgttgtgttgggaaacaagattgacctcgaaaacagacaagtggccacaaagcgggcacaggcctggtgctacagcaaaaacaacattccctactttgagaccagtgccaaggaggccatcaacgtggagcaggcgttccagacgattgcacggaatgcacttaagcaggaaacggaggtggagctgtacaacgaatttcctgaacctatcaaactggacaagaatgaccgggccaaggcctcggcagaaagctgcagttgctgagggggcagtgagagttgagcacagagtccttcacaaaccaagaacacacgtaggccttcaacacaattcccctctcctcttccaaacaaaacatacattgatctctcacatccagctgccaaaagaaaaccccatcaaacacagttacaccccacatatctctcacacacacacacacacgcacacacacacacacagatctgacgtaatcaaactccagcccttgcccgtgatggctccttggggtctgcctgcccacccacatgagcccgcgagtatggcagcaggacaagccagcggtggaagtcattctgatatggagttggcattggaagcttattctttttgttcactggagagagagagaactgtttacagttaatctgtgtctaattatctgattttttttattggtcttgtggtctttttaccccccctttcccctccctccttgaaggctaccccttgggaaggctggtgccccatgccccattacaggctcacacccagtctgatcaggctgagttttgtatgtatctatctgttaatgcttgttacttttaactaatcagatctttttacagtatccatttattatgtaatgcttcttagaaaagaatcttatagtacatgttaatatatgcaaccaattaaaatgtataaattagtgtaagaaattcttggattatgtgtttaagtcctgtaatgcaggcctgtaaggtggagggttgaaccctgtttggattgcagagtgttactcagaattgggaaatccagctagcggcagtattctgtacagtagacacaagaattatgtacgccttttatcaaagacttaagagccaaaaagcttttcatctctccagggggaaaactgtctagttcccttctgtgtctaaattttccaaaacgttgatttgcataatacagtggtatgtgcaatggataaattgccgttatttcaaaaattaaaattctcattttctttcttttttttcccccctgctccacacttcaaaactcccgttagatcagcattctactacaagagtgaaaggaaaaccctaacagatctgtcctagtgattttacctttgttctagaaggcgctcctttcagggttgtggtattcttaggttagcggagctttttcctcttttccccacccatctccccaatattgcccattattaattaacctctttctttggttggaaccctggcagttctgctcccttcctaggatctgcccctgcattgtagcttgcttaacggagcacttctcctttttccaaaggtctacattctagggtgtgggctgagttcttctgtaaagagatgaacgcaatgccaataaaattgaacaagaacaatg

SEQ ID NO: 86 - DNA, 2185 bp, Homo sapiens
  source 1..2185: mol_type = genomic DNA
agtcttggccataaagcctgaggcggcggcagcggcggagttggcggcttggagagctcgggagagttccctggaaccagaacttggaccttctcgcttctgtcctccgtttagtctcctcctcggcgggagccctcgcgacgcgcccggcccggagcccccagcgcagcggccgcgtttgaaggatgacctctaggaagaaagtgttgctgaaggttatcatcctgggagattctggagtcgggaagacatcactcatgaaccagtatgtgaataagaaattcagcaatcagtacaaagccacaataggagctgactttctgaccaaggaggtgatggtggatgacaggctagtcacaatgcagatatgggacacagcaggacaggaacggttccagtctctcggtgtggccttctacagaggtgcagactgctgcgttctggtatttgatgtgactgcccccaacacattcaaaaccctagatagctggagagatgagtttctcatccaggccagtccccgagatcctgaaaacttcccatttgttgtgttgggaaacaagattgacctcgaaaacagacaagtggccacaaagcgggcacaggcctggtgctacagcaaaaacaacattccctactttgagaccagtgccaaggaggccatcaacgtggagcaggcgttccagacgattgcacggaatgcacttaagcaggaaacggaggtggagctgtacaacgaatttcctgaacctatcaaactggacaagaatgaccgggccaaggcctcggcagaaagctgcagttgctgagggggcagtgagagttgagcacagagtccttcacaaaccaagaacacacgtaggccttcaacacaattcccctctcctcttccaaacaaaacatacattgatctctcacatccagctgccaaaagaaaaccccatcaaacacagttacaccccacatatctctcacacacacacacacacgcacacacacacacacagatctgacgtaatcaaactccagcccttgcccgtgatggctccttggggtctgcctgcccacccacatgagcccgcgagtatggcagcaggacaagccagcggtggaagtcattctgatatggagttggcattggaagcttattctttttgttcactggagagagagagaactgtttacagttaatctgtgtctaattatctgattttttttattggtcttgtggtctttttaccccccctttcccctccctccttgaaggctaccccttgggaaggctggtgccccatgccccattacaggctcacacccagtctgatcaggctgagttttgtatgtatctatctgttaatgcttgttacttttaactaatcagatctttttacagtatccatttattatgtaatgcttcttagaaaagaatcttatagtacatgttaatatatgcaaccaattaaaatgtataaattagtgtaagaaattcttggattatgtgtttaagtcctgtaatgcaggcctgtaaggtggagggttgaaccctgtttggattgcagagtgttactcagaattgggaaatccagctagcggcagtattctgtacagtagacacaagaattatgtacgccttttatcaaagacttaagagccaaaaagcttttcatctctccagggggaaaactgtctagttcccttctgtgtctaaattttccaaaacgttgatttgcataatacagtggtatgtgcaatggataaattgccgttatttcaaaaattaaaattctcattttctttcttttttttcccccctgctccacacttcaaaactcccgttagatcagcattctactacaagagtgaaaggaaaaccctaacagatctgtcctagtgattttacctttgttctagaaggcgctcctttcagggttgtggtattcttaggttagcggagctttttcctcttttccccacccatctccccaatattgcccattattaattaacctctttctttggttggaaccctggcagttctgctcccttcctaggatctgcccctgcattgtagcttgcttaacggagcacttctcctttttccaaaggtctacattctagggtgtgggctgagttcttctgtaaagagatgaacgcaatgccaataaaattgaacaagaacaatgat

SEQ ID NO: 87 - DNA, 1589 bp, Homo sapiens
  source 1..1589: mol_type = genomic DNA
ataaagcctgaggcggcggcagcggcggagttggcggcttggagagctcgggagagttccctggaaccagaacttggaccttctcgcttctgtcctccgtttagtctcctcctcggcgggagccctcgcgacgcgcccggcccggagcccccagcgcagcggccgcgtttgaaggatgacctctaggaagaaagtgttgctgaaggttatcatcctgggagattctggagtcgggaagacatcactcatgaaccagtatgtgaataagaaattcagcaatcagtacaaagccacaataggagctgactttctgaccaaggaggtgatggtggatgacaggctagtcacaatgcagatatgggacacagcaggacaggaacggttccagtctctcggtgtggccttctacagaggtgcagactgctgcgttctggtggccacaaagcgggcacaggcctggtgctacagcaaaaacaacattccctactttgagaccagtgccaaggaggccatcaacgtggagcaggcgttccagacgattgcacggaatgcacttaagcaggaaacggaggtggagctgtacaacgaatttcctgaacctatcaaactggacaagaatgaccgggccaaggcctcggcagaaagctgcagttgctgagggggcagtgagagttgagcacagagtccttcacaaaccaagaacacacgtaggccttcaacacaattcccctctcctcttccaaacaaaacatacattgatctctcacatccagctgccaaaagaaaaccccatcaaacacagttacaccccacatatctctcacacacacacacacacgcacacacacacacacagatctgacgtaatcaaactccagcccttgcccgtgatggctccttggggtctgcctgcccacccacatgagcccgcgagtatggcagcaggacaagccagcggtggaagtcattctgatatggagttggcattggaagcttattctttttgttcactggagagagagagaactgtttacagttaatctgtgtctaattatctgattttttttattggtcttgtggtctttttaccccccctttcccctccctccttgaaggctaccccttgggaaggctggtgccccatgccccattacaggctcacacccagtctgatcaggctgagttttgtatgtatctatctgttaatgcttgttacttttaactaatcagatctttttacagtatccatttattatgtaatgcttcttagaaaagaatcttatagtacatgttaatatatgcaaccaattaaaatgtataaattagtgtaagaaattcttggattatgtgtttaagtcctgtaatgcaggcctgtaaggtggagggttgaaccctgtttggattgcagagtgttactcagaattgggaaatccagctagcggcagtattctgtacagtagacacaagaattatgtacgccttttatcaaagacttaagagccaaaaagcttttcatctctccagggggaaaactgtctagttcccttctgtgtctaaattttccaaaacgttgatttgcataatacagt

SEQ ID NO: 88 - DNA, 552 bp, Homo sapiens
  source 1..552: mol_type = genomic DNA
cggccgcgtttgaaggatgacctctaggaagaaagtgttgctgaaggttatcatcctgggagattctggagtcgggaagacatcactcatgaaccagtatgtgaataagaaattcagcaatcagtacaaagccacaataggagctgactttctgaccaaggaggtgatggtggatgacaggctagtcacaatgcaggtaagcacatgtcttggctgtgctgaccaggccttgatagttcatttagtcttaatctttcctcatgcatagacattttccttccctgttcttcaaatcttattatcttatttgtagataattggctgatactcagttaaatttgaatttcagatcaatagtgaatacttttttagtatacttctagtgtatctcagatacgacttgctaagacacactaaaaaattcttcttaaaaaaaaactcagatttatcctttcttgttttttgttgtttttggttttgttgtttgctaaatttggcaacctgcaggtctctgtcttgtgcctctcttgacatccttgcccagtgctttag

SEQ ID NO: 89 - DNA, 2238 bp, Homo sapiens
  source 1..2238: mol_type = genomic DNA
gagtcccattcattttctggaagtcactgagtcataccctggcaaatgagaggcaattacagcaggagccctgtcttgatgagtagatagaccatgctgtggcaagtcctggaagacagttgagcagagatcaggcatttttcacatcttctggttatgagtagacaaggctgcctgaaagattttctggaaaagagtagtcactagagctgcagagtcaagtattcagacgtttgaaggatgacctctaggaagaaagtgttgctgaaggttatcatcctgggagattctggagtcgggaagacatcactcatgaaccagtatgtgaataagaaattcagcaatcagtacaaagccacaataggagctgactttctgaccaaggaggtgatggtggatgacaggctagtcacaatgcagatatgggacacagcaggacaggaacggttccagtctctcggtgtggccttctacagaggtgcagactgctgcgttctggtatttgatgtgactgcccccaacacattcaaaaccctagatagctggagagatgagtttctcatccaggccagtccccgagatcctgaaaacttcccatttgttgtgttgggaaacaagattgacctcgaaaacagacaagtggccacaaagcgggcacaggcctggtgctacagcaaaaacaacattccctactttgagaccagtgccaaggaggccatcaacgtggagcaggcgttccagacgattgcacggaatgcacttaagcaggaaacggaggtggagctgtacaacgaatttcctgaacctatcaaactggacaagaatgaccgggccaaggcctcggcagaaagctgcagttgctgagggggcagtgagagttgagcacagagtccttcacaaaccaagaacacacgtaggccttcaacacaattcccctctcctcttccaaacaaaacatacattgatctctcacatccagctgccaaaagaaaaccccatcaaacacagttacaccccacatatctctcacacacacacacacacgcacacacacacacacagatctgacgtaatcaaactccagcccttgcccgtgatggctccttggggtctgcctgcccacccacatgagcccgcgagtatggcagcaggacaagccagcggtggaagtcattctgatatggagttggcattggaagcttattctttttgttcactggagagagagagaactgtttacagttaatctgtgtctaattatctgattttttttattggtcttgtggtctttttaccccccctttcccctccctccttgaaggctaccccttgggaaggctggtgccccatgccccattacaggctcacacccagtctgatcaggctgagttttgtatgtatctatctgttaatgcttgttacttttaactaatcagatctttttacagtatccatttattatgtaatgcttcttagaaaagaatcttatagtacatgttaatatatgcaaccaattaaaatgtataaattagtgtaagaaattcttggattatgtgtttaagtcctgtaatgcaggcctgtaaggtggagggttgaaccctgtttggattgcagagtgttactcagaattgggaaatccagctagcggcagtattctgtacagtagacacaagaattatgtacgccttttatcaaagacttaagagccaaaaagcttttcatctctccagggggaaaactgtctagttcccttctgtgtctaaattttccaaaacgttgatttgcataatacagtggtatgtgcaatggataaattgccgttatttcaaaaattaaaattctcattttctttcttttttttcccccctgctccacacttcaaaactcccgttagatcagcattctactacaagagtgaaaggaaaaccctaacagatctgtcctagtgattttacctttgttctagaaggcgctcctttcagggttgtggtattcttaggttagcggagctttttcctcttttccccacccatctccccaatattgcccattattaattaacctctttctttggttggaaccctggcagttctgctcccttcctaggatctgcccctgcattgtagcttgcttaacggagcacttctcctttttccaaaggtctacattctagggtgtgggctgagttcttctgtaaagagatgaacgcaatgccaataaaattgaacaagaacaatg

SEQ ID NO: 90 - DNA, 2356 bp, Homo sapiens
  source 1..2356: mol_type = genomic DNA
cttcatggagattgttagaaaagggatagactagattaatatagtacataaaaatgtcaattagtggtaagtgctctgaaggaaaagcaagcagagtaacgggatagagagcaaatgaggggttatgctgctttaaataaagcggtcacttctttgagaaagtgatactgaagcagcgacctgaatgaagcaaggaccaagctgttgagtaagttggagcattagttcaaattgccaatccattcaattgatccaccacccaagtgagagaatacattctctccaacagcttgcaggggcaggatggccctgctgtgctgttctgcctcgctcttgggtccagagttttgtttgaaggatgacctctaggaagaaagtgttgctgaaggttatcatcctgggagattctggagtcgggaagacatcactcatgaaccagtatgtgaataagaaattcagcaatcagtacaaagccacaataggagctgactttctgaccaaggaggtgatggtggatgacaggctagtcacaatgcagatatgggacacagcaggacaggaacggttccagtctctcggtgtggccttctacagaggtgcagactgctgcgttctggtatttgatgtgactgcccccaacacattcaaaaccctagatagctggagagatgagtttctcatccaggccagtccccgagatcctgaaaacttcccatttgttgtgttgggaaacaagattgacctcgaaaacagacaagtggccacaaagcgggcacaggcctggtgctacagcaaaaacaacattccctactttgagaccagtgccaaggaggccatcaacgtggagcaggcgttccagacgattgcacggaatgcacttaagcaggaaacggaggtggagctgtacaacgaatttcctgaacctatcaaactggacaagaatgaccgggccaaggcctcggcagaaagctgcagttgctgagggggcagtgagagttgagcacagagtccttcacaaaccaagaacacacgtaggccttcaacacaattcccctctcctcttccaaacaaaacatacattgatctctcacatccagctgccaaaagaaaaccccatcaaacacagttacaccccacatatctctcacacacacacacacacgcacacacacacacacagatctgacgtaatcaaactccagcccttgcccgtgatggctccttggggtctgcctgcccacccacatgagcccgcgagtatggcagcaggacaagccagcggtggaagtcattctgatatggagttggcattggaagcttattctttttgttcactggagagagagagaactgtttacagttaatctgtgtctaattatctgattttttttattggtcttgtggtctttttaccccccctttcccctccctccttgaaggctaccccttgggaaggctggtgccccatgccccattacaggctcacacccagtctgatcaggctgagttttgtatgtatctatctgttaatgcttgttacttttaactaatcagatctttttacagtatccatttattatgtaatgcttcttagaaaagaatcttatagtacatgttaatatatgcaaccaattaaaatgtataaattagtgtaagaaattcttggattatgtgtttaagtcctgtaatgcaggcctgtaaggtggagggttgaaccctgtttggattgcagagtgttactcagaattgggaaatccagctagcggcagtattctgtacagtagacacaagaattatgtacgccttttatcaaagacttaagagccaaaaagcttttcatctctccagggggaaaactgtctagttcccttctgtgtctaaattttccaaaacgttgatttgcataatacagtggtatgtgcaatggataaattgccgttatttcaaaaattaaaattctcattttctttcttttttttcccccctgctccacacttcaaaactcccgttagatcagcattctactacaagagtgaaaggaaaaccctaacagatctgtcctagtgattttacctttgttctagaaggcgctcctttcagggttgtggtattcttaggttagcggagctttttcctcttttccccacccatctccccaatattgcccattattaattaacctctttctttggttggaaccctggcagttctgctcccttcctaggatctgcccctgcattgtagcttgcttaacggagcacttctcctttttccaaaggtctacattctagggtgtgggctgagttcttctgtaaagagatgaacgcaatgccaataaaattgaacaagaacaatg

SEQ ID NO: 91 - DNA, 576 bp, Homo sapiens
  source 1..576: mol_type = genomic DNA
tagcaggaaggttcagggccctgcactgttggggctgctcagacatttgtgcaagggaggtgttttgttttggtgtttccatcacactcacagtgatttctccttttccccctttagtttgaaggatgacctctaggaagaaagtgttgctgaaggttatcatcctgggagattctggagtcgggaagacatcactcatgaaccagtatgtgaataagaaattcagcaatcagtacaaagccacaataggagctgactttctgaccaaggaggtgatggtggatgacaggctagtcacaatgcagatatgggacacagcaggacaggaacggttccagtctctcggtgtggccttctacagaggtgcagactgctgcgttctggtatttgatgtgactgcccccaacacattcaaaaccctagatagctggagagatgagtttctcatccaggccagtccccgagatcctgaaaacttcccatttgttgtgttgggaaacaagattgacctcgaaaacagacaagtggccacaaagcgggcacaggcctggtgctacagcaaaaacaacattccct

SEQ ID NO: 92 - DNA, 533 bp, Homo sapiens
  source 1..533: mol_type = genomic DNA
gtttgaaggatgacctctaggaagaaagtgttgctgaaggttatcatcctgggagattctggagtcgggaagacatcactcatgaaccagtatgtgaataagaaattcagcaatcagtacaaagccacaataggagctgactttctgaccaaggaggtgatggtggatgacaggctagtcacaatgcaggtggccacaaagcgggcacaggcctggtgctacagcaaaaacaacattccctactttgagaccagtgccaaggaggccatcaacgtggagcaggcgttccagacgattgcacggaatgcacttaagcaggaaacggaggtggagctgtacaacgaatttcctgaacctatcaaactggacaagaatgaccgggccaaggcctcggcagaaagctgcagttgctgagggggcagtgagagttgagcacagagtccttcacaaaccaagaacacacgtaggccttcaacacaattcccctctcctcttccaaacaaaacatacattgatctctcacatccagctgc

SEQ ID NO: 93 - DNA, 507 bp, Homo sapiens
  source 1..507: mol_type = genomic DNA
gtttgaaggatgacctctaggaagaaagtgttgctgaaggttatcatcctgggagattctggagtcgggaagacatcactcatgaaccagtatgtgaataagaaattcagcaatcagtacaaagccacaataggagctgactttctgaccaaggaggtgatggtggatgacaggctagtcacaatgcaggaaacggaggtggagctgtacaacgaatttcctgaacctatcaaactggacaagaatgaccgggccaaggcctcggcagaaagctgcagttgctgagggggcagtgagagttgagcacagagtccttcacaaaccaagaacacacgtaggccttcaacacaattcccctctcctcttccaaacaaaacatacattgatctctcacatccagctgccaaaagaaaaccccatcaaacacagttacaccccacatatctctcacacacacacacacacgcacacacacacacacagatctgacgtaatcaaactccagcc

SEQ ID NO: 94 - DNA, 2078 bp, Homo sapiens
  source 1..2078: mol_type = genomic DNA
agtatgtgaataagaaattcagcaatcagtacaaagccacaataggagctgactttctgaccaaggaggtgatggtggatgacaggctagtcacaatgcagtcattccgaatcatgtgctgctcttacagacttgtgttggtggatatgtctctgcttccagcagggcctgtatacccacctgaagtctccaacttttagctcagatctttggaaacttctatctccatggcagttgttctttcctatgtgcttctagagatatgggacacagcaggacaggaacggttccagtctctcggtgtggccttctacagaggtgcagactgctgcgttctggtatttgatgtgactgcccccaacacattcaaaaccctagatagctggagagatgagtttctcatccaggccagtccccgagatcctgaaaacttcccatttgttgtgttgggaaacaagattgacctcgaaaacagacaagtggccacaaagcgggcacaggcctggtgctacagcaaaaacaacattccctactttgagaccagtgccaaggaggccatcaacgtggagcaggcgttccagacgattgcacggaatgcacttaagcaggaaacggaggtggagctgtacaacgaatttcctgaacctatcaaactggacaagaatgaccgggccaaggcctcggcagaaagctgcagttgctgagggggcagtgagagttgagcacagagtccttcacaaaccaagaacacacgtaggccttcaacacaattcccctctcctcttccaaacaaaacatacattgatctctcacatccagctgccaaaagaaaaccccatcaaacacagttacaccccacatatctctcacacacacacacacacgcacacacacacacacagatctgacgtaatcaaactccagcccttgcccgtgatggctccttggggtctgcctgcccacccacatgagcccgcgagtatggcagcaggacaagccagcggtggaagtcattctgatatggagttggcattggaagcttattctttttgttcactggagagagagagaactgtttacagttaatctgtgtctaattatctgattttttttattggtcttgtggtctttttaccccccctttcccctccctccttgaaggctaccccttgggaaggctggtgccccatgccccattacaggctcacacccagtctgatcaggctgagttttgtatgtatctatctgttaatgcttgttacttttaactaatcagatctttttacagtatccatttattatgtaatgcttcttagaaaagaatcttatagtacatgttaatatatgcaaccaattaaaatgtataaattagtgtaagaaattcttggattatgtgtttaagtcctgtaatgcaggcctgtaaggtggagggttgaaccctgtttggattgcagagtgttactcagaattgggaaatccagctagcggcagtattctgtacagtagacacaagaattatgtacgccttttatcaaagacttaagagccaaaaagcttttcatctctccagggggaaaactgtctagttcccttctgtgtctaaattttccaaaacgttgatttgcataatacagtggtatgtgcaatggataaattgccgttatttcaaaaattaaaattctcattttctttcttttttttcccccctgctccacacttcaaaactcccgttagatcagcattctactacaagagtgaaaggaaaaccctaacagatctgtcctagtgattttacctttgttctagaaggcgctcctttcagggttgtggtattcttaggttagcggagctttttcctcttttccccacccatctccccaatattgcccattattaattaacctctttctttggttggaaccctggcagttctgctcccttcctaggatctgcccctgcattgtagcttgcttaacggagcacttctcctttttccaaaggtctacattctagggtgtgggctgagttcttctgtaaagagatgaacgcaatgccaataaaattgaacaagaacaatg

SEQ ID NO: 95 - DNA, 1997 bp, Homo sapiens
  source 1..1997: mol_type = genomic DNA
atgggcagcacagtgttctgtctctgctgaaataaccctcctgaatgaaagagtacatctttaagggctagtggcagaagttctaaaggataactccaggcagaaagtgatttcatgaagataggtctgaaggaagaacacttcaatagtatacttgtatctatttttggaatcgtgaatatgggacacagcaggacaggaacggttccagtctctcggtgtggccttctacagaggtgcagactgctgcgttctggtatttgatgtgactgcccccaacacattcaaaaccctagatagctggagagatgagtttctcatccaggccagtccccgagatcctgaaaacttcccatttgttgtgttgggaaacaagattgacctcgaaaacagacaagtggccacaaagcgggcacaggcctggtgctacagcaaaaacaacattccctactttgagaccagtgccaaggaggccatcaacgtggagcaggcgttccagacgattgcacggaatgcacttaagcaggaaacggaggtggagctgtacaacgaatttcctgaacctatcaaactggacaagaatgaccgggccaaggcctcggcagaaagctgcagttgctgagggggcagtgagagttgagcacagagtccttcacaaaccaagaacacacgtaggccttcaacacaattcccctctcctcttccaaacaaaacatacattgatctctcacatccagctgccaaaagaaaaccccatcaaacacagttacaccccacatatctctcacacacacacacacacgcacacacacacacacagatctgacgtaatcaaactccagcccttgcccgtgatggctccttggggtctgcctgcccacccacatgagcccgcgagtatggcagcaggacaagccagcggtggaagtcattctgatatggagttggcattggaagcttattctttttgttcactggagagagagagaactgtttacagttaatctgtgtctaattatctgattttttttattggtcttgtggtctttttaccccccctttcccctccctccttgaaggctaccccttgggaaggctggtgccccatgccccattacaggctcacacccagtctgatcaggctgagttttgtatgtatctatctgttaatgcttgttacttttaactaatcagatctttttacagtatccatttattatgtaatgcttcttagaaaagaatcttatagtacatgttaatatatgcaaccaattaaaatgtataaattagtgtaagaaattcttggattatgtgtttaagtcctgtaatgcaggcctgtaaggtggagggttgaaccctgtttggattgcagagtgttactcagaattgggaaatccagctagcggcagtattctgtacagtagacacaagaattatgtacgccttttatcaaagacttaagagccaaaaagcttttcatctctccagggggaaaactgtctagttcccttctgtgtctaaattttccaaaacgttgatttgcataatacagtggtatgtgcaatggataaattgccgttatttcaaaaattaaaattctcattttctttcttttttttcccccctgctccacacttcaaaactcccgttagatcagcattctactacaagagtgaaaggaaaaccctaacagatctgtcctagtgattttacctttgttctagaaggcgctcctttcagggttgtggtattcttaggttagcggagctttttcctcttttccccacccatctccccaatattgcccattattaattaacctctttctttggttggaaccctggcagttctgctcccttcctaggatctgcccctgcattgtagcttgcttaacggagcacttctcctttttccaaaggtctacattctagggtgtgggctgagttcttctgtaaagagatgaacgcaatgccaataaaattgaacaagaacaatga

SEQ ID NO: 96 - DNA, 6033 bp, Homo sapiens
  source 1..6033: mol_type = genomic DNA
tctcagcgaagcgtctgcgaccgtcgtttgagtcgtcgctgccgctgccgctgccactgccactgccacctcgcggatcaggagccagcgttgttcgcccgacgcctcgctgccggtgggaggaagcgagagggaagccgcttgcgggtttgtcgccgctgctcgcccaccgcctggaagagccgagccccggcccagtcggtcgcttgccaccgctcgtagccgttacccgcgggccgccacagccgccggccgggagaggcgcgcgccatggcttctggagccgattcaaaaggtgatgacctatcaacagccattctcaaacagaagaaccgtcccaatcggttaattgttgatgaagccatcaatgaggacaacagtgtggtgtccttgtcccagcccaagatggatgaattgcagttgttccgaggtgacacagtgttgctgaaaggaaagaagagacgagaagctgtttgcatcgtcctttctgatgatacttgttctgatgagaagattcggatgaatagagttgttcggaataaccttcgtgtacgcctaggggatgtcatcagcatccagccatgccctgatgtgaagtacggcaaacgtatccatgtgctgcccattgatgacacagtggaaggcattactggtaatctcttcgaggtataccttaagccgtacttcctggaagcgtatcgacccatccggaaaggagacatttttcttgtccgtggtgggatgcgtgctgtggagttcaaagtggtggaaacagatcctagcccttattgcattgttgctccagacacagtgatccactgcgaaggggagcctatcaaacgagaggatgaggaagagtccttgaatgaagtagggtatgatgacattggtggctgcaggaagcagctagctcagataaaggagatggtggaactgcccctgagacatcctgccctctttaaggcaattggtgtgaagcctcctagaggaatcctgctttacggacctcctggaacaggaaagaccctgattgctcgagctgtagcaaatgagactggagccttcttcttcttgatcaatggtcctgagatcatgagcaaattggctggtgagtctgagagcaaccttcgtaaagcctttgaggaggctgagaagaatgctcctgccatcatcttcattgatgagctagatgccatcgctcccaaaagagagaaaactcatggcgaggtggagcggcgcattgtatcacagttgttgaccctcatggatggcctaaagcagagggcacatgtgattgttatggcagcaaccaacagacccaacagcattgacccagctctacggcgatttggtcgctttgacagggaggtagatattggaattcctgatgctacaggacgcttagagattcttcagatccataccaagaacatgaagctggcagatgatgtggacctggaacaggtagccaatgagactcacgggcatgtgggtgctgacttagcagccctgtgctcagaggctgctctgcaagccatccgcaagaagatggatctcattgacctagaggatgagaccattgatgccgaggtcatgaactctctagcagttactatggatgacttccggtgggccttgagccagagtaacccatcagcactgcgggaaaccgtggtagaggtgccacaggtaacctgggaagacatcgggggcctagaggatgtcaaacgtgagctacaggagctggtccagtatcctgtggagcacccagacaaattcctgaagtttggcatgacaccttccaagggagttctgttctatggacctcctggctgtgggaaaactttgttggccaaagccattgctaatgaatgccaggccaacttcatctccatcaagggtcctgagctgctcaccatgtggtttggggagtctgaggccaatgtcagagaaatctttgacaaggcccgccaagctgccccctgtgtgctattctttgatgagctggattcgattgccaaggctcgtggaggtaacattggagatggtggtggggctgctgaccgagtcatcaaccagatcctgacagaaatggatggcatgtccacaaaaaaaaatgtgttcatcattggcgctaccaaccggcctgacatcattgatcctgccatcctcagacctggccgtcttgatcagctcatctacatcccacttcctgatgagaagtcccgtgttgccatcctcaaggctaacctgcgcaagtccccagttgccaaggatgtggacttggagttcctggctaaaatgactaatggcttctctggagctgacctgacagagatttgccagcgtgcttgcaagctggccatccgtgaatccatcgagagtgagattaggcgagaacgagagaggcagacaaacccatcagccatggaggtagaagaggatgatccagtgcctgagatccgtcgagatcactttgaagaagccatgcgctttgcgcgccgttctgtcagtgacaatgacattcggaagtatgagatgtttgcccagacccttcagcagagtcggggctttggcagcttcaggtaagttggttgggagcattagacagtgcttaagttactttggggacctacaccaaaagggatgggagtcctaaggaagctagaggggtagttgtggaaatcttacacaggccctgtcctaaccctcttttttggctttgctcttgtacacagattcccttcagggaaccagggtggagctggccccagtcagggcagtggaggcggcacaggtggcagtgtatacacagaagacaatgatgatgacctgtatggctaagtggtggtggccagcgtgcagtgagctggcctgcctggaccttgttccctgggggtgggggcgcttgcccaggagagggaccaggggtgcgcccacagcctgctccattctccagtctgaacagttcagctacagtctgactctggacagggggtttctgttgcaaaaatacaaaacaaaagcgataaaataaaagcgattttcatttggtaggcggagagtgaattaccaacagggaattgggccttgggcctatgccatttctgttgtagtttggggcagtgcaggggacctgtgtggggtgtgaaccaaggcactactgccacctgccacagtaaagcatctgcacttgactcaatgctgcccgagccctcccttccccctatccaacctgggtaggtgggtaggggccacagttgctggatgtttatatagagagtaggttgatttattttacatgcttttgagttaatgttggaaaactaatcacaagcagtttctaaaccaaaaaatgacatgttgtaaaaggacaataaacgttgggtcaaaatggagcctgagtcctgggccctgtgcctgcttcttttcctgggaacagccttgggctacccaccactcccaaggcattcttccaaatgtgaaatcctggaagtaagattgcaccttcttcctctcctgatcaacatcggtatgatgtctcctgttgcctcaccctttgtctgcagtatcactggataggactggtggaaagggagcagcctgacagagctccaaatgtggagaatatggcatccctccacctatatttgatgtggacggtaaggctaggcctgcaggatcccttatcctgaccaaagactgtgttggggtgccatttgaaaatcgcagggttgcaaaagaatacaatcttacttgcaggtggatattctctatactctcttttaatgcatctaaaaatcccaaacatcccctggttggtgatcacttacagttgtgtccacctttattttatgtactttgattaaaaaaaaaaaactttttgttaatataaaattttagtattgaattttttttttttccaaacagaaaatagactatcctcttcaacagtaatcacttagtgcttctagggtcagtacagtgatgccttacccagagagagagtagtgcagagaaaataaattactaaattaaatatatgttgattggctttgggacataatctcaaaagacagtcctgaacaccgtaattttgaataaaatactgtaatctccaaagatcaaaatccctaaagtctaaaattctgaaaatcacaatcccaaaaggtcaaaatcccaaaatacaattctggaagaaatactaaacattcttcgaaaatttacttacatttttaaaagcgtatttatttgagaaacaacacaacagaacgtttcataggccactacacgataaaatagggaatagtaacatttttgcaagataaacactcaggtataccaatgacagttgcacggatataacggtgatgagcagatgaaacattcataaagaaataggtcaaaaagtgaaatgtataaatgctttgtcactatgcttggtaattgtgggcacctagctttatataactggtcatctgtaatactgtgacagaaaacctaagtcttgatgagatggttcaaaaactgttgcgttaccactgcattgtctcccaaagagacgaggtcttgagaaattttatccttcacaaatgcacgtgtacaaaaaacagatgtctcttcgtttattgaggaactttcaacatttttatgcacacatataatgcttacacacagagtcaacattgcggtcatggagtcaaatttttaatgtccaaggcaccagaagaaaaatctgtcctaggctgggcatggtggctcatgcctgtaatcccagcactttgggatgctgaggcgggcagatcacctgaggtcgggagctcaagaccagcctgaccaaaatggagaaaccccatctctactacaaatacaaaattagccaggcgtggtggcgcttgcctgtactcccagctacttgggaggctgaggcagagaatagcttgaacccgggaggcggaggttgtcgtgagctgagatggagccattgcactccagcctgggcaacaagagcaaaactcaatcttaaaaaagaagaaaaatctatcctacctcttagagaccaatttgccttctgtatttgttctctctgggcccccgcctgttggatggtacccaccaacattgaaggcagatcttccccactcagtccactcagacttacaaactaatccccggaaacaacctcacagacacacccagataatgctttaccaggtttctaaatactccttaatccagtaaaattgacacctaaaattaagtccacaattctgctcattggcaacttggcacccttatgtgtctaaaccatacttaagacaataacaaggtaatacttctgtataacatgatgcaactgtcttgtttacaacgaaaaacatactaatcctttccccagaatttgaaattttattttgtccaggttgtgattttaaggattttgatcttttgggacttcaacatttggggttatggtgtttgggattgtgtccttcaggattatgatcaacactggtattagtcatcctagactttatgctaggcaagaccaggctccgttttggtctacatagataatcttcaaggatgcatgatacttacactggttgactaaactggagcagctctggaactcatgctgtgaaatgggtatttttgcacttttggtatttgttatttcaggaggtttttagggaacaggtggtggttggttacgtgaataagttctttagtggtgatttctaagattttggtgcacctgtcatctgagcggtgtacaccgtacccaatgtgtagtcttttatccctcaccgcccccccaccttttccctgagtccccagagtccgttgtatcattcttacgcctttgcattctcatagcttagctcccatgtacgagtgagaacgtatgatgtttggttttccattcctgagtgagttcacttagaataatggtattccagttgctgcaaatgccattatttcgttccttcttatggctgagtagtattccctggatgtatatataccaca

SEQ ID NO: 97 - DNA, 4362 bp, Homo sapiens
  source 1..4362: mol_type = genomic DNA
ctgccacctcgcggatcaggagccagcgttgttcgcccgacgcctcgctgccggtgggaggaagcgagagggaagccgcttgcgggtttgtcgccgctgctcgcccaccgcctggaagagccgagccccggcccagtcggtcgcttgccaccgctcgtagccgttacccgcgggccgccacagccgccggccgggagaggcgcgcgccatggcttctggagccgagtgatgacctatcaacagccattctcaaacagaagaaccgtcccaatcggttaattgttgatgaagccatcaatgaggacaacagtgtggtgtccttgtcccagcccaagatggatgaattgcagttgttccgaggtgacacagtgttgctgaaaggaaagaagagacgagaagctgtttgcatcgtcctttctgatgatacttgttctgatgagaagattcggatgaatagagttgttcggaataaccttcgtgtacgcctaggggatgtcatcagcatccagccatgccctgatgtgaagtacggcaaacgtatccatgtgctgcccattgatgacacagtggaaggcattactggtaatctcttcgaggtataccttaagccgtacttcctggaagcgtatcgacccatccggaaaggagacatttttcttgtccgtggtgggatgcgtgctgtggagttcaaagtggtggaaacagatcctagcccttattgcattgttgctccagacacagtgatccactgcgaaggggagcctatcaaacgagaggatgaggaagagtccttgaatgaagtagggtatgatgacattggtggctgcaggaagcagctagctcagataaaggagatggtggaactgcccctgagacatcctgccctctttaaggcaattggtgtgaagcctcctagaggaatcctgctttacggacctcctggaacaggaaagaccctgattgctcgagctgtagcaaatgagactggagccttcttcttcttgatcaatggtcctgagatcatgagcaaattggctggtgagtctgagagcaaccttcgtaaagcctttgaggaggctgagaagaatgctcctgccatcatcttcattgatgagctagatgccatcgctcccaaaagagagaaaactcatggcgaggtggagcggcgcattgtatcacagttgttgaccctcatggatggcctaaagcagagggcacatgtgattgttatggcagcaaccaacagacccaacagcattgacccagctctacggcgatttggtcgctttgacagggaggtagatattggaattcctgatgctacaggacgcttagagattcttcagatccataccaagaacatgaagctggcagatgatgtggacctggaacaggtagccaatgagactcacgggcatgtgggtgctgacttagcagccctgtgctcagaggctgctctgcaagccatccgcaagaagatggatctcattgacctagaggatgagaccattgatgccgaggtcatgaactctctagcagttactatggatgacttccggtgggccttgagccagagtaacccatcagcactgcgggaaaccgtggtagaggtgccacaggtaacctgggaagacatcgggggcctagaggatgtcaaacgtgagctacaggagctggtccagtatcctgtggagcacccagacaaattcctgaagtttggcatgacaccttccaagggagttctgttctatggacctcctggctgtgggaaaactttgttggccaaagccattgctaatgaatgccaggccaacttcatctccatcaagggtcctgagctgctcaccatgtggtttggggagtctgaggccaatgtcagagaaatctttgacaaggcccgccaagctgccccctgtgtgctattctttgatgagctggattcgattgccaaggctcgtggaggtaacattggagatggtggtggggctgctgaccgagtcatcaaccagatcctgacagaaatggatggcatgtccacaaaaaaaaatgtgttcatcattggcgctaccaaccggcctgacatcattgatcctgccatcctcagacctggccgtcttgatcagctcatctacatcccacttcctgatgagaagtcccgtgttgccatcctcaaggctaacctgcgcaagtccccagttgccaaggatgtggacttggagttcctggctaaaatgactaatggcttctctggagctgacctgacagagatttgccagcgtgcttgcaagctggccatccgtgaatccatcgagagtgagattaggcgagaacgagagaggcagacaaacccatcagccatggaggtagaagaggatgatccagtgcctgagatccgtcgagatcactttgaagaagccatgcgctttgcgcgccgttctgtcagtgacaatgacattcggaagtatgagatgtttgcccagacccttcagcagagtcggggctttggcagcttcagattcccttcagggaaccagggtggagctggccccagtcagggcagtggaggcggcacaggtggcagtgtatacacagaagacaatgatgatgacctgtatggctaagtggtggtggccagcgtgcagtgagctggcctgcctggaccttgttccctgggggtgggggcgcttgcccaggagagggaccaggggtgcgcccacagcctgctccattctccagtctgaacagttcagctacagtctgactctggacagggggtttctgttgcaaaaatacaaaacaaaagcgataaaataaaagcgattttcatttggtaggcggagagtgaattaccaacagggaattgggccttgggcctatgccatttctgttgtagtttggggcagtgcaggggacctgtgtggggtgtgaaccaaggcactactgccacctgccacagtaaagcatctgcacttgactcaatgctgcccgagccctcccttccccctatccaacctgggtaggtgggtaggggccacagttgctggatgtttatatagagagtaggttgatttattttacatgcttttgagttaatgttggaaaactaatcacaagcagtttctaaaccaaaaaatgacatgttgtaaaaggacaataaacgttgggtcaaaatggagcctgagtcctgggccctgtgcctgcttcttttcctgggaacagccttgggctacccaccactcccaaggcattcttccaaatgtgaaatcctggaagtaagattgcaccttcttcctctcctgatcaacatcggtatgatgtctcctgttgcctcaccctttgtctgcagtatcactggataggactggtggaaagggagcagcctgacagagctccaaatgtggagaatatggcatccctccacctatatttgatgtggacggtaaggctaggcctgcaggatcccttatcctgaccaaagactgtgttggggtgccatttgaaaatcgcagggttgcaaaagaatacaatcttacttgcaggtggatattctctatactctcttttaatgcatctaaaaatcccaaacatcccctggttggtgatcacttacagttgtgtccacctttattttatgtactttgattaaaaaaaaaaaactttttgttaatataaaattttagtattgaattttttttttttccaaacagaaaatagactatcctcttcaacagtaatcacttagtgcttctagggtcagtacagtgatgccttacccagagagagagtagtgcagagaaaataaattactaaattaaatatatgttgattggctttgggacataatctcaaaagacagtcctgaacaccgtaattttgaataaaatactgtaatctccaaagatcaaaatccctaaagtctaaaattctgaaaatcacaatcccaaaaggtcaaaatcccaaaatacaattctggaagaaatactaaacattcttcgaaaatttacttacatttttaaaagcgtatttatttgagaaacaacacaacagaacgtttcataggccactacacgataaaatagggaatagtaacatttttgcaagataaacactcaggtataccaatgacagttgcacggatataacggtgatgagcagatgaaacattcataaagaaataggtcaaaaagtgaaatgtataaatgctttgtcactatgcttggtaattgtgggcacctagctttatataactggtcatctgtaatactgtgacagaaaacctaagtcttgatgagatggttcaaaaactgttgcgttaccactgcattgtctcccaaagagacgaggtcttgagaaattttatcc

SEQ ID NO: 98 - DNA, 4480 bp, Homo sapiens
  source 1..4480: mol_type = genomic DNA
actgccactgccacctcgcggatcaggagccagcgttgttcgcccgacgcctcgctgccggtgggaggaagcgagagggaagccgcttgcgggtttgtcgccgctgctcgcccaccgcctggaagagccgagccccggcccagtcggtcgcttgccaccgctcgtagccgttacccgcgggccgccacagccgccggccgggagaggcgcgcgccatggcttctggagccgattcaaaaggtgatgacctatcaacagccattctcaaacagaagaaccgtcccaatcggttaattgttgatgaagccatcaatgaggacaacagtgtggtgtccttgtcccagtgactgcagatagagtggggtttactgggaatcccaatctccagggctgctgcttactccccgtcagcccaatgacccaaaggccttaactttctttcctcagcccaagatggatgaattgcagttgttccgaggtgacacagtgttgctgaaaggaaagaagagacgagaagctgtttgcatcgtcctttctgatgatacttgttctgatgagaagattcggatgaatagagttgttcggaataaccttcgtgtacgcctaggggatgtcatcagcatccagccatgccctgatgtgaagtacggcaaacgtatccatgtgctgcccattgatgacacagtggaaggcattactggtaatctcttcgaggtataccttaagccgtacttcctggaagcgtatcgacccatccggaaaggagacatttttcttgtccgtggtgggatgcgtgctgtggagttcaaagtggtggaaacagatcctagcccttattgcattgttgctccagacacagtgatccactgcgaaggggagcctatcaaacgagaggatgaggaagagtccttgaatgaagtagggtatgatgacattggtggctgcaggaagcagctagctcagataaaggagatggtggaactgcccctgagacatcctgccctctttaaggcaattggtgtgaagcctcctagaggaatcctgctttacggacctcctggaacaggaaagaccctgattgctcgagctgtagcaaatgagactggagccttcttcttcttgatcaatggtcctgagatcatgagcaaattggctggtgagtctgagagcaaccttcgtaaagcctttgaggaggctgagaagaatgctcctgccatcatcttcattgatgagctagatgccatcgctcccaaaagagagaaaactcatggcgaggtggagcggcgcattgtatcacagttgttgaccctcatggatggcctaaagcagagggcacatgtgattgttatggcagcaaccaacagacccaacagcattgacccagctctacggcgatttggtcgctttgacagggaggtagatattggaattcctgatgctacaggacgcttagagattcttcagatccataccaagaacatgaagctggcagatgatgtggacctggaacaggtagccaatgagactcacgggcatgtgggtgctgacttagcagccctgtgctcagaggctgctctgcaagccatccgcaagaagatggatctcattgacctagaggatgagaccattgatgccgaggtcatgaactctctagcagttactatggatgacttccggtgggccttgagccagagtaacccatcagcactgcgggaaaccgtggtagaggtgccacaggtaacctgggaagacatcgggggcctagaggatgtcaaacgtgagctacaggagctggtccagtatcctgtggagcacccagacaaattcctgaagtttggcatgacaccttccaagggagttctgttctatggacctcctggctgtgggaaaactttgttggccaaagccattgctaatgaatgccaggccaacttcatctccatcaagggtcctgagctgctcaccatgtggtttggggagtctgaggccaatgtcagagaaatctttgacaaggcccgccaagctgccccctgtgtgctattctttgatgagctggattcgattgccaaggctcgtggaggtaacattggagatggtggtggggctgctgaccgagtcatcaaccagatcctgacagaaatggatggcatgtccacaaaaaaaaatgtgttcatcattggcgctaccaaccggcctgacatcattgatcctgccatcctcagacctggccgtcttgatcagctcatctacatcccacttcctgatgagaagtcccgtgttgccatcctcaaggctaacctgcgcaagtccccagttgccaaggatgtggacttggagttcctggctaaaatgactaatggcttctctggagctgacctgacagagatttgccagcgtgcttgcaagctggccatccgtgaatccatcgagagtgagattaggcgagaacgagagaggcagacaaacccatcagccatggaggtagaagaggatgatccagtgcctgagatccgtcgagatcactttgaagaagccatgcgctttgcgcgccgttctgtcagtgacaatgacattcggaagtatgagatgtttgcccagacccttcagcagagtcggggctttggcagcttcagattcccttcagggaaccagggtggagctggccccagtcagggcagtggaggcggcacaggtggcagtgtatacacagaagacaatgatgatgacctgtatggctaagtggtggtggccagcgtgcagtgagctggcctgcctggaccttgttccctgggggtgggggcgcttgcccaggagagggaccaggggtgcgcccacagcctgctccattctccagtctgaacagttcagctacagtctgactctggacagggggtttctgttgcaaaaatacaaaacaaaagcgataaaataaaagcgattttcatttggtaggcggagagtgaattaccaacagggaattgggccttgggcctatgccatttctgttgtagtttggggcagtgcaggggacctgtgtggggtgtgaaccaaggcactactgccacctgccacagtaaagcatctgcacttgactcaatgctgcccgagccctcccttccccctatccaacctgggtaggtgggtaggggccacagttgctggatgtttatatagagagtaggttgatttattttacatgcttttgagttaatgttggaaaactaatcacaagcagtttctaaaccaaaaaatgacatgttgtaaaaggacaataaacgttgggtcaaaatggagcctgagtcctgggccctgtgcctgcttcttttcctgggaacagccttgggctacccaccactcccaaggcattcttccaaatgtgaaatcctggaagtaagattgcaccttcttcctctcctgatcaacatcggtatgatgtctcctgttgcctcaccctttgtctgcagtatcactggataggactggtggaaagggagcagcctgacagagctccaaatgtggagaatatggcatccctccacctatatttgatgtggacggtaaggctaggcctgcaggatcccttatcctgaccaaagactgtgttggggtgccatttgaaaatcgcagggttgcaaaagaatacaatcttacttgcaggtggatattctctatactctcttttaatgcatctaaaaatcccaaacatcccctggttggtgatcacttacagttgtgtccacctttattttatgtactttgattaaaaaaaaaaaactttttgttaatataaaattttagtattgaattttttttttttccaaacagaaaatagactatcctcttcaacagtaatcacttagtgcttctagggtcagtacagtgatgccttacccagagagagagtagtgcagagaaaataaattactaaattaaatatatgttgattggctttgggacataatctcaaaagacagtcctgaacaccgtaattttgaataaaatactgtaatctccaaagatcaaaatccctaaagtctaaaattctgaaaatcacaatcccaaaaggtcaaaatcccaaaatacaattctggaagaaatactaaacattcttcgaaaatttacttacatttttaaaagcgtatttatttgagaaacaacacaacagaacgtttcataggccactacacgataaaatagggaatagtaacatttttgcaagataaacactcaggtataccaatgacagttgcacggatataacggtgatgagcagatgaaacattcataaagaaataggtcaaaaagtgaaatgtataaatgctttgtcactatgcttggtaattgtgggcacctagctttatataactggtcatctgtaatactgtgacagaaaacctaagtcttgatgagatggttcaaaaactgttgcgttaccactgcattgtctcccaaagagacgaggtcttgagaaattttatcc

SEQ ID NO: 99 - DNA, 4561 bp, Homo sapiens
  source 1..4561: mol_type = genomic DNA
tcgtcgctgccgctgccgctgccactgccactgccacctcgcggatcaggagccagcgttgttcgcccgacgcctcgctgccggtgggaggaagcgagagggaagccgcttgcgggtttgtcgccgctgctcgcccaccgcctggaagagccgagccccggcccagtcggtcgcttgccaccgctcgtagccgttacccgcgggccgccacagccgccggccgggagaggcgcgcgccatggcttctggagccgattcaaaaggtgatgacctatcaacagccattctcaaacagaagaaccgtcccaatcggttaattgttgatgaagccatcaatgaggacaacagtgtggtgtccttgtcccagcccaagatggatgaattgcagttgttccgaggtgacacagtgttgctgaaaggaaagaagagacgagaagctgtttgcatcgtcctttctgatgatacttgttctgatgagaagattcggatgaatagagttgttcggaataaccttcgtgtacgcctaggggatgtcatcagctatctgtgccaggcccttttggacacccagtgcttgggcccgaagtgtggttggtaatatggagtctgcttgtcatcctcagcatccagccatgccctgatgtgaagtacggcaaacgtatccatgtgctgcccattgatgacacagtggaaggcattactggtaatctcttcgaggtataccttaagccgtacttcctggaagcgtatcgacccatccggaaaggagacatttttcttgtccgtggtgggatgcgtgctgtggagttcaaagtggtggaaacagatcctagcccttattgcattgttgctccagacacagtgatccactgcgaaggggagcctatcaaacgagaggatgaggaagagtccttgaatgaagtagggtatgatgacattggtggctgcaggaagcagctagctcagataaaggagatggtggaactgcccctgagacatcctgccctctttaaggcaattggtgtgaagcctcctagaggaatcctgctttacggacctcctggaacaggaaagaccctgattgctcgagctgtagcaaatgagactggagccttcttcttcttgatcaatggtcctgagatcatgagcaaattggctggtgagtctgagagcaaccttcgtaaagcctttgaggaggctgagaagaatgctcctgccatcatcttcattgatgagctagatgccatcgctcccaaaagagagaaagtaggagcttacctgaggggatagaggggggttgaaaggccctgacttcacttctgaccagacatcctgttctggcagactcatggcgaggtggagcggcgcattgtatcacagttgttgaccctcatggatggcctaaagcagagggcacatgtgattgttatggcagcaaccaacagacccaacagcattgacccagctctacggcgatttggtcgctttgacagggaggtagatattggaattcctgatgctacaggacgcttagagattcttcagatccataccaagaacatgaagctggcagatgatgtggacctggaacaggtagccaatgagactcacgggcatgtgggtgctgacttagcagccctgtgctcagaggctgctctgcaagccatccgcaagaagatggatctcattgacctagaggatgagaccattgatgccgaggtcatgaactctctagcagttactatggatgacttccggtgggccttgagccagagtaacccatcagcactgcgggaaaccgtggtagaggtgccacaggtaacctgggaagacatcgggggcctagaggatgtcaaacgtgagctacaggagctggtccagtatcctgtggagcacccagacaaattcctgaagtttggcatgacaccttccaagggagttctgttctatggacctcctggctgtgggaaaactttgttggccaaagccattgctaatgaatgccaggccaacttcatctccatcaagggtcctgagctgctcaccatgtggtttggggagtctgaggccaatgtcagagaaatctttgacaaggcccgccaagctgccccctgtgtgctattctttgatgagctggattcgattgccaaggctcgtggaggtaacattggagatggtggtggggctgctgaccgagtcatcaaccagatcctgacagaaatggatggcatgtccacaaaaaaaaatgtgttcatcattggcgctaccaaccggcctgacatcattgatcctgccatcctcagacctggccgtcttgatcagctcatctacatcccacttcctgatgagaagtcccgtgttgccatcctcaaggctaacctgcgcaagtccccagttgccaaggatgtggacttggagttcctggctaaaatgactaatggcttctctggagctgacctgacagagatttgccagcgtgcttgcaagctggccatccgtgaatccatcgagagtgagattaggcgagaacgagagaggcagacaaacccatcagccatggaggtagaagaggatgatccagtgcctgagatccgtcgagatcactttgaagaagccatgcgctttgcgcgccgttctgtcagtgacaatgacattcggaagtatgagatgtttgcccagacccttcagcagagtcggggctttggcagcttcagattcccttcagggaaccagggtggagctggccccagtcagggcagtggaggcggcacaggtggcagtgtatacacagaagacaatgatgatgacctgtatggctaagtggtggtggccagcgtgcagtgagctggcctgcctggaccttgttccctgggggtgggggcgcttgcccaggagagggaccaggggtgcgcccacagcctgctccattctccagtctgaacagttcagctacagtctgactctggacagggggtttctgttgcaaaaatacaaaacaaaagcgataaaataaaagcgattttcatttggtaggcggagagtgaattaccaacagggaattgggccttgggcctatgccatttctgttgtagtttggggcagtgcaggggacctgtgtggggtgtgaaccaaggcactactgccacctgccacagtaaagcatctgcacttgactcaatgctgcccgagccctcccttccccctatccaacctgggtaggtgggtaggggccacagttgctggatgtttatatagagagtaggttgatttattttacatgcttttgagttaatgttggaaaactaatcacaagcagtttctaaaccaaaaaatgacatgttgtaaaaggacaataaacgttgggtcaaaatggagcctgagtcctgggccctgtgcctgcttcttttcctgggaacagccttgggctacccaccactcccaaggcattcttccaaatgtgaaatcctggaagtaagattgcaccttcttcctctcctgatcaacatcggtatgatgtctcctgttgcctcaccctttgtctgcagtatcactggataggactggtggaaagggagcagcctgacagagctccaaatgtggagaatatggcatccctccacctatatttgatgtggacggtaaggctaggcctgcaggatcccttatcctgaccaaagactgtgttggggtgccatttgaaaatcgcagggttgcaaaagaatacaatcttacttgcaggtggatattctctatactctcttttaatgcatctaaaaatcccaaacatcccctggttggtgatcacttacagttgtgtccacctttattttatgtactttgattaaaaaaaaaaaactttttgttaatataaaattttagtattgaattttttttttttccaaacagaaaatagactatcctcttcaacagtaatcacttagtgcttctagggtcagtacagtgatgccttacccagagagagagtagtgcagagaaaataaattactaaattaaatatatgttgattggctttgggacataatctcaaaagacagtcctgaacaccgtaattttgaataaaatactgtaatctccaaagatcaaaatccctaaagtctaaaattctgaaaatcacaatcccaaaaggtcaaaatcccaaaatacaattctggaagaaatactaaacattcttcgaaaatttacttacatttttaaaagcgtatttatttgagaaacaacacaacagaacgtttcataggccactacacgataaaatagggaatagtaacatttttgcaagataaacactcaggtataccaatgacagttgcacggatataacggtgatgagcagatgaaacattcataaagaaataggtcaaaaagtgaaatgtataaatgctttgtcactatgcttggtaattgtgggcacctagctttatataactggtcatctgtaatactgtgacagaaaacctaagtcttgatgagatggttcaaaaactgttgcgttaccactgcattgtctcccaaagagacgaggtcttgagaaattttatcc

SEQ ID NO: 100 - DNA, 4404 bp, Homo sapiens
  source 1..4404: mol_type = genomic DNA
gtcgtttgagtcgtcgctgccgctgccgctgccactgccactgccacctcgcggatcaggagccagcgttgttcgcccgacgcctcgctgccggtgggaggaagcgagagggaagccgcttgcgggtttgtcgccgctgctcgcccaccgcctggaagagccgagccccggcccagtcggtcgcttgccaccgctcgtagccgttacccgcgggccgccacagccgccggccgggagaggcgcgcgccatggcttctggagccgattcaaaaggtgatgacctatcaacagccattctcaaacagaagaaccgtcccaatcggttaattgttgatgaagccatcaatgaggacaacagtgtggtgtccttgtcccagatggatgaattgcagttgttccgaggtgacacagtgttgctgaaaggaaagaagagacgagaagctgtttgcatcgtcctttctgatgatacttgttctgatgagaagattcggatgaatagagttgttcggaataaccttcgtgtacgcctaggggatgtcatcagcatccagccatgccctgatgtgaagtacggcaaacgtatccatgtgctgcccattgatgacacagtggaaggcattactggtaatctcttcgaggtataccttaagccgtacttcctggaagcgtatcgacccatccggaaaggagacatttttcttgtccgtggtgggatgcgtgctgtggagttcaaagtggtggaaacagatcctagcccttattgcattgttgctccagacacagtgatccactgcgaaggggagcctatcaaacgagaggatgaggaagagtccttgaatgaagtagggtatgatgacattggtggctgcaggaagcagctagctcagataaaggagatggtggaactgcccctgagacatcctgccctctttaaggcaattggtgtgaagcctcctagaggaatcctgctttacggacctcctggaacaggaaagaccctgattgctcgagctgtagcaaatgagactggagccttcttcttcttgatcaatggtcctgagatcatgagcaaattggctggtgagtctgagagcaaccttcgtaaagcctttgaggaggctgagaagaatgctcctgccatcatcttcattgatgagctagatgccatcgctcccaaaagagagaaaactcatggcgaggtggagcggcgcattgtatcacagttgttgaccctcatggatggcctaaagcagagggcacatgtgattgttatggcagcaaccaacagacccaacagcattgacccagctctacggcgatttggtcgctttgacagggaggtagatattggaattcctgatgctacaggacgcttagagattcttcagatccataccaagaacatgaagctggcagatgatgtggacctggaacaggtagccaatgagactcacgggcatgtgggtgctgacttagcagccctgtgctcagaggctgctctgcaagccatccgcaagaagatggatctcattgacctagaggatgagaccattgatgccgaggtcatgaactctctagcagttactatggatgacttccggtgggccttgagccagagtaacccatcagcactgcgggaaaccgtggtagaggtgccacaggtaacctgggaagacatcgggggcctagaggatgtcaaacgtgagctacaggagctggtccagtatcctgtggagcacccagacaaattcctgaagtttggcatgacaccttccaagggagttctgttctatggacctcctggctgtgggaaaactttgttggccaaagccattgctaatgaatgccaggccaacttcatctccatcaagggtcctgagctgctcaccatgtggtttggggagtctgaggccaatgtcagagaaatctttgacaaggcccgccaagctgccccctgtgtgctattctttgatgagctggattcgattgccaaggctcgtggaggtaacattggagatggtggtggggctgctgaccgagtcatcaaccagatcctgacagaaatggatggcatgtccacaaaaaaaaatgtgttcatcattggcgctaccaaccggcctgacatcattgatcctgccatcctcagacctggccgtcttgatcagctcatctacatcccacttcctgatgagaagtcccgtgttgccatcctcaaggctaacctgcgcaagtccccagttgccaaggatgtggacttggagttcctggctaaaatgactaatggcttctctggagctgacctgacagagatttgccagcgtgcttgcaagctggccatccgtgaatccatcgagagtgagattaggcgagaacgagagaggcagacaaacccatcagccatggaggtagaagaggatgatccagtgcctgagatccgtcgagatcactttgaagaagccatgcgctttgcgcgccgttctgtcagtgacaatgacattcggaagtatgagatgtttgcccagacccttcagcagagtcggggctttggcagcttcagattcccttcagggaaccagggtggagctggccccagtcagggcagtggaggcggcacaggtggcagtgtatacacagaagacaatgatgatgacctgtatggctaagtggtggtggccagcgtgcagtgagctggcctgcctggaccttgttccctgggggtgggggcgcttgcccaggagagggaccaggggtgcgcccacagcctgctccattctccagtctgaacagttcagctacagtctgactctggacagggggtttctgttgcaaaaatacaaaacaaaagcgataaaataaaagcgattttcatttggtaggcggagagtgaattaccaacagggaattgggccttgggcctatgccatttctgttgtagtttggggcagtgcaggggacctgtgtggggtgtgaaccaaggcactactgccacctgccacagtaaagcatctgcacttgactcaatgctgcccgagccctcccttccccctatccaacctgggtaggtgggtaggggccacagttgctggatgtttatatagagagtaggttgatttattttacatgcttttgagttaatgttggaaaactaatcacaagcagtttctaaaccaaaaaatgacatgttgtaaaaggacaataaacgttgggtcaaaatggagcctgagtcctgggccctgtgcctgcttcttttcctgggaacagccttgggctacccaccactcccaaggcattcttccaaatgtgaaatcctggaagtaagattgcaccttcttcctctcctgatcaacatcggtatgatgtctcctgttgcctcaccctttgtctgcagtatcactggataggactggtggaaagggagcagcctgacagagctccaaatgtggagaatatggcatccctccacctatatttgatgtggacggtaaggctaggcctgcaggatcccttatcctgaccaaagactgtgttggggtgccatttgaaaatcgcagggttgcaaaagaatacaatcttacttgcaggtggatattctctatactctcttttaatgcatctaaaaatcccaaacatcccctggttggtgatcacttacagttgtgtccacctttattttatgtactttgattaaaaaaaaaaaactttttgttaatataaaattttagtattgaattttttttttttccaaacagaaaatagactatcctcttcaacagtaatcacttagtgcttctagggtcagtacagtgatgccttacccagagagagagtagtgcagagaaaataaattactaaattaaatatatgttgattggctttgggacataatctcaaaagacagtcctgaacaccgtaattttgaataaaatactgtaatctccaaagatcaaaatccctaaagtctaaaattctgaaaatcacaatcccaaaaggtcaaaatcccaaaatacaattctggaagaaatactaaacattcttcgaaaatttacttacatttttaaaagcgtatttatttgagaaacaacacaacagaacgtttcataggccactacacgataaaatagggaatagtaacatttttgcaagataaacactcaggtataccaatgacagttgcacggatataacggtgatgagcagatgaaacattcataaagaaataggtcaaaaagtgaaatgtataaatgctttgtcactatgcttggtaattgtgggcacctagctttatataactggtcatctgtaatactgtgacagaaaacctaagtcttgatgagatggttcaaaaactgttgcgttaccactgcattgtctcccaaagagacgaggtcttgagaaattttatcc

SEQ ID NO: 101 - DNA, 4451 bp, Homo sapiens
  source 1..4451: mol_type = genomic DNA
agtctcagcgaagcgtctgcgaccgtcgtttgagtcgtcgctgccgctgccgctgccactgccactgccacctcgcggatcaggagccagcgttgttcgcccgacgcctcgctgccggtgggaggaagcgagagggaagccgcttgcgggtttgtcgccgctgctcgcccaccgcctggaagagccgagccccggcccagtcggtcgcttgccaccgctcgtagccgttacccgcgggccgccacagccgccggccgggagaggcgcgcgccatggcttctggagccgattcaaaaggtgatgacctatcaacagccattctcaaacagaagaaccgtcccaatcggttaattgttgatgaagccatcaatgaggacaacagtgtggtgtccttgtcccagcccaagatggatgaattgcagttgttccgaggtgacacagtgttgctgaaaggaaagaagagacgagaagctgtttgcatcgtcctttctgatgatacttgttctgatgagaagattcggatgaatagagttgttcggaataaccttcgtgtacgcctaggggatgtcatcagcatccagccatgccctgatgtgaagtacggcaaacgtatccatgtgctgcccattgatgacacagtggaaggcattactggtaatctcttcgaggtataccttaagccgtacttcctggaagcgtatcgacccatccggaaaggagacatttttcttgtccgtggtgggatgcgtgctgtggagttcaaagtggtggaaacagatcctagcccttattgcattgttgctccagacacagtgatccactgcgaaggggagcctatcaaacgagaggatgaggaagagtccttgaatgaagtagggtatgatgacattggtggctgcaggaagcagctagctcagataaaggagatggtggaactgcccctgagacatcctgccctctttaaggcaattggtgtgaagcctcctagaggaatcctgctttacggacctcctggaacaggaaagaccctgattgctcgagctgtagcaaatgagactggagccttcttcttcttgatcaatggtcctgagatcatgagcaaattggctggtgagtctgagagcaaccttcgtaaagcctttgaggaggctgagaagaatgctcctgccatcatcttcattgatgagctagatgccatcgctcccaaaagagagaaaacatcctgttctggcagactcatggcgaggtggagcggcgcattgtatcacagttgttgaccctcatggatggcctaaagcagagggcacatgtgattgttatggcagcaaccaacagacccaacagcattgacccagctctacggcgatttggtcgctttgacagggaggtagatattggaattcctgatgctacaggacgcttagagattcttcagatccataccaagaacatgaagctggcagatgatgtggacctggaacaggtagccaatgagactcacgggcatgtgggtgctgacttagcagccctgtgctcagaggctgctctgcaagccatccgcaagaagatggatctcattgacctagaggatgagaccattgatgccgaggtcatgaactctctagcagttactatggatgacttccggtgggccttgagccagagtaacccatcagcactgcgggaaaccgtggtagaggtgccacaggtaacctgggaagacatcgggggcctagaggatgtcaaacgtgagctacaggagctggtccagtatcctgtggagcacccagacaaattcctgaagtttggcatgacaccttccaagggagttctgttctatggacctcctggctgtgggaaaactttgttggccaaagccattgctaatgaatgccaggccaacttcatctccatcaagggtcctgagctgctcaccatgtggtttggggagtctgaggccaatgtcagagaaatctttgacaaggcccgccaagctgccccctgtgtgctattctttgatgagctggattcgattgccaaggctcgtggaggtaacattggagatggtggtggggctgctgaccgagtcatcaaccagatcctgacagaaatggatggcatgtccacaaaaaaaaatgtgttcatcattggcgctaccaaccggcctgacatcattgatcctgccatcctcagacctggccgtcttgatcagctcatctacatcccacttcctgatgagaagtcccgtgttgccatcctcaaggctaacctgcgcaagtccccagttgccaaggatgtggacttggagttcctggctaaaatgactaatggcttctctggagctgacctgacagagatttgccagcgtgcttgcaagctggccatccgtgaatccatcgagagtgagattaggcgagaacgagagaggcagacaaacccatcagccatggaggtagaagaggatgatccagtgcctgagatccgtcgagatcactttgaagaagccatgcgctttgcgcgccgttctgtcagtgacaatgacattcggaagtatgagatgtttgcccagacccttcagcagagtcggggctttggcagcttcagattcccttcagggaaccagggtggagctggccccagtcagggcagtggaggcggcacaggtggcagtgtatacacagaagacaatgatgatgacctgtatggctaagtggtggtggccagcgtgcagtgagctggcctgcctggaccttgttccctgggggtgggggcgcttgcccaggagagggaccaggggtgcgcccacagcctgctccattctccagtctgaacagttcagctacagtctgactctggacagggggtttctgttgcaaaaatacaaaacaaaagcgataaaataaaagcgattttcatttggtaggcggagagtgaattaccaacagggaattgggccttgggcctatgccatttctgttgtagtttggggcagtgcaggggacctgtgtggggtgtgaaccaaggcactactgccacctgccacagtaaagcatctgcacttgactcaatgctgcccgagccctcccttccccctatccaacctgggtaggtgggtaggggccacagttgctggatgtttatatagagagtaggttgatttattttacatgcttttgagttaatgttggaaaactaatcacaagcagtttctaaaccaaaaaatgacatgttgtaaaaggacaataaacgttgggtcaaaatggagcctgagtcctgggccctgtgcctgcttcttttcctgggaacagccttgggctacccaccactcccaaggcattcttccaaatgtgaaatcctggaagtaagattgcaccttcttcctctcctgatcaacatcggtatgatgtctcctgttgcctcaccctttgtctgcagtatcactggataggactggtggaaagggagcagcctgacagagctccaaatgtggagaatatggcatccctccacctatatttgatgtggacggtaaggctaggcctgcaggatcccttatcctgaccaaagactgtgttggggtgccatttgaaaatcgcagggttgcaaaagaatacaatcttacttgcaggtggatattctctatactctcttttaatgcatctaaaaatcccaaacatcccctggttggtgatcacttacagttgtgtccacctttattttatgtactttgattaaaaaaaaaaaactttttgttaatataaaattttagtattgaattttttttttttccaaacagaaaatagactatcctcttcaacagtaatcacttagtgcttctagggtcagtacagtgatgccttacccagagagagagtagtgcagagaaaataaattactaaattaaatatatgttgattggctttgggacataatctcaaaagacagtcctgaacaccgtaattttgaataaaatactgtaatctccaaagatcaaaatccctaaagtctaaaattctgaaaatcacaatcccaaaaggtcaaaatcccaaaatacaattctggaagaaatactaaacattcttcgaaaatttacttacatttttaaaagcgtatttatttgagaaacaacacaacagaacgtttcataggccactacacgataaaatagggaatagtaacatttttgcaagataaacactcaggtataccaatgacagttgcacggatataacggtgatgagcagatgaaacattcataaagaaataggtcaaaaagtgaaatgtataaatgctttgtcactatgcttggtaattgtgggcacctagctttatataactggtcatctgtaatactgtgacagaaaacctaagtcttgatgagatggttcaaaaactgttgcgttaccactgcattgtctcccaaagagacgaggtcttgagaaattttatcc

SEQ ID NO: 102 - DNA, 1303 bp, Homo sapiens
  source 1..1303: mol_type = genomic DNA
gaggtagaagaggatgatccagtgcctgagatccgtcgagatcactttgaagaagccatgcgctttgcgcgccgttctgtcagtgacaatgacattcggaagtatgagatgtttgcccagacccttcagcagagtcggggctttggcagcttcagggaaccagggtggagctggccccagtcagggcagtggaggcggcacaggtggcagtgtatacacagaagacaatgatgatgacctgtatggctaagtggtggtggccagcgtgcagtgagctggcctgcctggaccttgttccctgggggtgggggcgcttgcccaggagagggaccaggggtgcgcccacagcctgctccattctccagtctgaacagttcagctacagtctgactctggacagggggtttctgttgcaaaaatacaaaacaaaagcgataaaataaaagcgattttcatttggtaggcggagagtgaattaccaacagggaattgggccttgggcctatgccatttctgttgtagtttggggcagtgcaggggacctgtgtggggtgtgaaccaaggcactactgccacctgccacagtaaagcatctgcacttgactcaatgctgcccgagccctcccttccccctatccaacctgggtaggtgggtaggggccacagttgctggatgtttatatagagagtaggttgatttattttacatgcttttgagttaatgttggaaaactaatcacaagcagtttctaaaccaaaaaatgacatgttgtaaaaggacaataaacgttgggtcaaaatggagcctgagtcctgggccctgtgcctgcttcttttcctgggaacagccttgggctacccaccactcccaaggcattcttccaaatgtgaaatcctggaagtaagattgcaccttcttcctctcctgatcaacatcggtatgatgtctcctgttgcctcaccctttgtctgcagtatcactggataggactggtggaaagggagcagcctgacagagctccaaatgtggagaatatggcatccctccacctatatttgatgtggacggtaaggctaggcctgcaggatcccttatcctgaccaaagactgtgttggggtgccatttgaaaatcgcagggttgcaaaagaatacaatcttacttgcaggtggatattctctatactctcttttaatgcatctaaaaatcccaaacatcccctggttggtgatcacttacagttgtgtccacctttattttatgtactttgattaaaaaaaaaaaactttttgttaatataaaa

SEQ ID NO: 103 - DNA, 3746 bp, Homo sapiens
  source 1..3746: mol_type = genomic DNA
agtctcagcgaagcgtctgcgaccgtcgtttgagtcgtcgctgccgctgccgctgccactgccactgccacctcgcggatcaggagccagcgttgttcgcccgacgcctcgctgccggtgggaggaagcgagagggaagccgcttgcgggtttgtcgccgctgctcgcccaccgcctggaagagccgagccccggcccagtcggtcgcttgccaccgctcgtagccgttacccgcgggccgccacagccgccggccgggagaggcgcgcgccatggcttctggagccgattcaaaaggtgatgacctatcaacagccattctcaaacagaagaaccgtcccaatcggttaattgttgatgaagccatcaatgaggacaacagtgtggtgtccttgtcccagcccaagatggatgaattgcagttgttccgaggtgacacagtgttgctgaaaggaaagaagagacgagaagctgtttgcatcgtcctttctgatgatacttgttctgatgagaagattcggatgaatagagttgttcggaataaccttcgtgtacgcctaggggatgtcatcagcatccagccatgccctgatgtgaagtacggcaaacgtatccatgtgctgcccattgatgacacagtggaaggcattactggtaatctcttcgaggtataccttaagccgtacttcctggaagcgtatcgacccatccggaaaggagacatttttcttgtccgtggtgggatgcgtgctgtggagttcaaagtggtggaaacagatcctagcccttattgcattgttgctccagacacagtgatccactgcgaaggggagcctatcaaacgagaggatgaggaagagtccttgaatgaagtagggtatgatgacattggtggctgcaggaagcagctagctcagataaaggagatggtggaactgcccctgagacatcctgccctctttaaggcaattggtgtgaagcctcctagaggaatcctgctttacggacctcctggaacaggaaagaccctgattgctcgagctgtagcaaatgagactggagccttcttcttcttgatcaatggtcctgagatcatgagcaaattggctggtgagtctgagagcaaccttcgtaaagcctttgaggaggctgagaagaatgctcctgccatcatcttcattgatgagctagatgccatcgctcccaaaagagagaaaactcatggcgaggtggagcggcgcattgtatcacagttgttgaccctcatggatggcctaaagcagagggcacatgtgattgttatggcagcaaccaacagacccaacagcattgacccagctctacggcgatttggtcgctttgacagggaggtagatattggaattcctgatgctacaggacgcttagagattcttcagatccataccaagaacatgaagctggcagatgatgtggacctggaacaggtagccaatgagactcacgggcatgtgggtgctgacttagcagccctgtgctcagaggctgctctgcaagccatccgcaagaagatggatctcattgacctagaggatgagaccattgatgccgaggtcatgaactctctagcagttactatggatgacttccggtgggccttgagccagagtaacccatcagcactgcgggaaaccgtggtagaggtgccacaggtaacctgggaagacatcgggggcctagaggatgtcaaacgtgagctacaggagctggtccagtatcctgtggagcacccagacaaattcctgaagtttggcatgacaccttccaagggagttctgttctatggacctcctggctgtgggaaaactttgttggccaaagccattgctaatgaatgccaggccaacttcatctccatcaagggtcctgagctgctcaccatgtggtttggggagtctgaggccaatgtcagagaaatctttgacaaggcccgccaagctgccccctgtgtgctattctttgatgagctggattcgattgccaaggctcgtggaggtaacattggagatggtggtggggctgctgaccgagtcatcaaccagatcctgacagaaatggatggcatgtccacaaaaaaaaatgtgttcatcattggcgctaccaaccggcctgacatcattgatcctgccatcctcagacctggccgtcttgatcagctcatctacatcccacttcctgatgagaagtcccgtgttgccatcctcaaggctaacctgcgcaagtccccagttgccaaggatgtggacttggagttcctggctaaaatgactaatggcttctctggagctgacctgacagagatttgccagcgtgcttgcaagctggccatccgtgaatccatcgagagtgagattaggcgagaacgagagaggcagacaaacccatcagccatggaggtagaagaggatgatccagtgcctgagatccgtcgagatcactttgaagaagccatgcgctttgcgcgccgttctgtcagtgacaatgacattcggaagtatgagatgtttgcccagacccttcagcagagtcggggctttggcagcttcagattcccttcagggaaccagggtggagctggccccagtcagggcagtggaggcggcacaggtggcagtgtatacacagaagacaatgatgatgacctgtatggctaagtggtggtggccagcgtgcagtgagctggcctgcctggaccttgttccctgggggtgggggcgcttgcccaggagagggaccaggggtgcgcccacagcctgctccattctccagtctgaacagttcagctacagtctgactctggacagggggtttctgttgcaaaaatacaaaacaaaagcgataaaataaaagcgattttcatttggtaggcggagagtgaattaccaacagggaattgggccttgggcctatgccatttctgttgtagtttggggcagtgcaggggacctgtgtggggtgtgaaccaaggcactactgccacctgccacagtaaagcatctgcacttgactcaatgctgcccgagccctcccttccccctatccaacctgggtaggtgggtaggggccacagttgctggatgtttatatagagagtaggttgatttattttacatgcttttgagttaatgttggaaaactaatcacaagcagtttctaaaccaaaaaatgacatgttgtaaaaggacaataaacgttgggtcaaaatggagcctgagtcctgggccctgtgcctgcttcttttcctgggaacagccttgggctacccaccactcccaaggcattcttccaaatgtgaaatcctggaagtaagattgcaccttcttcctctcctgatcaacatcggtatgatgtctcctgttgcctcaccctttgtctgcagtatcactggataggactggtggaaagggagcagcctgacagagctccaaatgtggagaatatggcatccctccacctatatttgatgtggacggtaaggctaggcctgcaggatcccttatcctgaccaaagactgtgttggggtgccatttgaaaatcgcagggttgcaaaagaatacaatcttacttgcaggtggatattctctatactctcttttaatgcatctaaaaatcccaaacatcccctggttggtgatcacttacagttgtgtccacctttattttatgtactttgattaaaaaaaaaaaactttttgttaatataaaa

SEQ ID NO: 104 - DNA, 3849 bp, Homo sapiens
  source 1..3849: mol_type = genomic DNA
gtgggagcagcttcccttccgatgattcggctcttctcggctcagtctcagcgaagcgtctgcgaccgtcgtttgagtcgtcgctgccgctgccgctgccactgccactgccacctcgcggatcaggagccagcgttgttcgcccgacgcctcgctgccggtgggaggaagcgagagggaagccgcttgcgggtttgtcgccgctgctcgcccaccgcctggaagagccgagccccggcccagtcggtcgcttgccaccgctcgtagccgttacccgcgggccgccacagccgccggccgggagaggcgcgcgccatggcttctggagccgagtgagtgtgcgcgcgccgttcgcttgctgcggcggcgcgcaccgggaccagccgcgcaggttcaaaaggtgatgacctatcaacagccattctcaaacagaagaaccgtcccaatcggttaattgttgatgaagccatcaatgaggacaacagtgtggtgtccttgtcccagcccaagatggatgaattgcagttgttccgaggtgacacagtgttgctgaaaggaaagaagagacgagaagctgtttgcatcgtcctttctgatgatacttgttctgatgagaagattcggatgaatagagttgttcggaataaccttcgtgtacgcctaggggatgtcatcagcatccagccatgccctgatgtgaagtacggcaaacgtatccatgtgctgcccattgatgacacagtggaaggcattactggtaatctcttcgaggtataccttaagccgtacttcctggaagcgtatcgacccatccggaaaggagacatttttcttgtccgtggtgggatgcgtgctgtggagttcaaagtggtggaaacagatcctagcccttattgcattgttgctccagacacagtgatccactgcgaaggggagcctatcaaacgagaggatgaggaagagtccttgaatgaagtagggtatgatgacattggtggctgcaggaagcagctagctcagataaaggagatggtggaactgcccctgagacatcctgccctctttaaggcaattggtgtgaagcctcctagaggaatcctgctttacggacctcctggaacaggaaagaccctgattgctcgagctgtagcaaatgagactggagccttcttcttcttgatcaatggtcctgagatcatgagcaaattggctggtgagtctgagagcaaccttcgtaaagcctttgaggaggctgagaagaatgctcctgccatcatcttcattgatgagctagatgccatcgctcccaaaagagagaaaactcatggcgaggtggagcggcgcattgtatcacagttgttgaccctcatggatggcctaaagcagagggcacatgtgattgttatggcagcaaccaacagacccaacagcattgacccagctctacggcgatttggtcgctttgacagggaggtagatattggaattcctgatgctacaggacgcttagagattcttcagatccataccaagaacatgaagctggcagatgatgtggacctggaacaggtagccaatgagactcacgggcatgtgggtgctgacttagcagccctgtgctcagaggctgctctgcaagccatccgcaagaagatggatctcattgacctagaggatgagaccattgatgccgaggtcatgaactctctagcagttactatggatgacttccggtgggccttgagccagagtaacccatcagcactgcgggaaaccgtggtagaggtgccacaggtaacctgggaagacatcgggggcctagaggatgtcaaacgtgagctacaggagctggtccagtatcctgtggagcacccagacaaattcctgaagtttggcatgacaccttccaagggagttctgttctatggacctcctggctgtgggaaaactttgttggccaaagccattgctaatgaatgccaggccaacttcatctccatcaagggtcctgagctgctcaccatgtggtttggggagtctgaggccaatgtcagagaaatctttgacaaggcccgccaagctgccccctgtgtgctattctttgatgagctggattcgattgccaaggctcgtggaggtaacattggagatggtggtggggctgctgaccgagtcatcaaccagatcctgacagaaatggatggcatgtccacaaaaaaaaatgtgttcatcattggcgctaccaaccggcctgacatcattgatcctgccatcctcagacctggccgtcttgatcagctcatctacatcccacttcctgatgagaagtcccgtgttgccatcctcaaggctaacctgcgcaagtccccagttgccaaggatgtggacttggagttcctggctaaaatgactaatggcttctctggagctgacctgacagagatttgccagcgtgcttgcaagctggccatccgtgaatccatcgagagtgagattaggcgagaacgagagaggcagacaaacccatcagccatggaggtagaagaggatgatccagtgcctgagatccgtcgagatcactttgaagaagccatgcgctttgcgcgccgttctgtcagtgacaatgacattcggaagtatgagatgtttgcccagacccttcagcagagtcggggctttggcagcttcagattcccttcagggaaccagggtggagctggccccagtcagggcagtggaggcggcacaggtggcagtgtatacacagaagacaatgatgatgacctgtatggctaagtggtggtggccagcgtgcagtgagctggcctgcctggaccttgttccctgggggtgggggcgcttgcccaggagagggaccaggggtgcgcccacagcctgctccattctccagtctgaacagttcagctacagtctgactctggacagggggtttctgttgcaaaaatacaaaacaaaagcgataaaataaaagcgattttcatttggtaggcggagagtgaattaccaacagggaattgggccttgggcctatgccatttctgttgtagtttggggcagtgcaggggacctgtgtggggtgtgaaccaaggcactactgccacctgccacagtaaagcatctgcacttgactcaatgctgcccgagccctcccttccccctatccaacctgggtaggtgggtaggggccacagttgctggatgtttatatagagagtaggttgatttattttacatgcttttgagttaatgttggaaaactaatcacaagcagtttctaaaccaaaaaatgacatgttgtaaaaggacaataaacgttgggtcaaaatggagcctgagtcctgggccctgtgcctgcttcttttcctgggaacagccttgggctacccaccactcccaaggcattcttccaaatgtgaaatcctggaagtaagattgcaccttcttcctctcctgatcaacatcggtatgatgtctcctgttgcctcaccctttgtctgcagtatcactggataggactggtggaaagggagcagcctgacagagctccaaatgtggagaatatggcatccctccacctatatttgatgtggacggtaaggctaggcctgcaggatcccttatcctgaccaaagactgtgttggggtgccatttgaaaatcgcagggttgcaaaagaatacaatcttacttgcaggtggatattctctatactctcttttaatgcatctaaaaatcccaaacatcccctggttggtgatcacttacagttgtgtccacctttattttatgtactttgattaaaaaaaaaaaactttttgttaatataaaa

SEQ ID NO: 105 - DNA, 2895 bp, Homo sapiens
  source 1..2895: mol_type = genomic DNA
gattcggctcttctcggctcagtctcagcgaagcgtctgcgaccgtcgtttgagtcgtcgctgccgctgccgctgccactgccactgccacctcgcggatcaggagccagcgttgttcgcccgacgcctcgctgccggtgggaggaagcgagagggaagccgcttgcgggtttgtcgccgctgctcgcccaccgcctggaagagccgagccccggcccagtcggtcgcttgccaccgctcgtagccgttacccgcgggccgccacagccgccggccgggagaggcgcgcgccatggcttctggagccgattcaaaaggtgatgacctatcaacagccattctcaaacagaagaaccgtcccaatcggttaattgttgatgaagccatcaatgaggacaacagtgtggtgtccttgtcccagcccaagatggatgaattgcagttgttccgaggtgacacagtgttgctgaaaggaaagaagagacgagaagctgtttgcatcgtcctttctgatgatacttgttctgatgagaagattcggatgaatagagttgttcggaataaccttcgtgtacgcctaggggatgtcatcagcatccagccatgccctgatgtgaagtacggcaaacgtatccatgtgctgcccattgatgacacagtggaaggcattactggtaatctcttcgaggtataccttaagccgtacttcctggaagcgtatcgacccatccggaaaggagacatttttcttgtccgtggtgggatgcgtgctgtggagttcaaagtggtggaaacagatcctagcccttattgcattgttgctccagacacagtgatccactgcgaaggggagcctatcaaacgagaggatgaggaagagtccttgaatgaagtagggtatgatgacattggtggctgcaggaagcagctagctcagataaaggagatggtggaactgcccctgagacatcctgccctctttaaggcaattggtgtgaagcctcctagaggaatcctgctttacggacctcctggaacaggaaagaccctgattgctcgagctgtagcaaatgagactggagccttcttcttcttgatcaatggtcctgagatcatgagcaaattggctggtgagtctgagagcaaccttcgtaaagcctttgaggaggctgagaagaatgctcctgccatcatcttcattgatgagctagatgccatcgctcccaaaagagagaaaactcatggcgaggtggagcggcgcattgtatcacagttgttgaccctcatggatggcctaaagcagagggcacatgtgattgttatggcagcaaccaacagacccaacagcattgacccagctctacggcgatttggtcgctttgacagggaggtagatattggaattcctgatgctacaggacgcttagagattcttcagatccataccaagaacatgaagctggcagatgatgtggacctggaacaggtagccaatgagactcacgggcatgtgggtgctgacttagcagccctgtgctcagaggctgctctgcaagccatccgcaagaagatggatctcattgacctagaggatgagaccattgatgccgaggtcatgaactctctagcagttactatggatgacttccggtgggccttgagccagagtaacccatcagcactgcgggaaaccgtggtagaggtgccacaggtaacctgggaagacatcgggggcctagaggatgtcaaacgtgagctacaggagctggtccagtatcctgtggagcacccagacaaattcctgaagtttggcatgacaccttccaagggagttctgttctatggacctcctggctgtgggaaaactttgttggccaaagccattgctaatgaatgccaggccaacttcatctccatcaagggtcctgagctgctcaccatgtggtttggggagtctgaggccaatgtcagagaaatctttgacaaggcccgccaagctgccccctgtgtgctattctttgatgagctggattcgattgccaaggctcgtggaggtaacattggagatggtggtggggctgctgaccgagtcatcaaccagatcctgacagaaatggatggcatgtccacaaaaaaaaatgtgttcatcattggcgctaccaaccggcctgacatcattgatcctgccatcctcagacctggccgtcttgatcagctcatctacatcccacttcctgatgagaagtcccgtgttgccatcctcaaggctaacctgcgcaagtccccagttgccaaggatgtggacttggagttcctggctaaaatgactaatggcttctctggagctgacctgacagagatttgccagcgtgctttgagctggcctgcctggaccttgttccctgggggtgggggcgcttgcccaggagagggaccaggggtgcgcccacagcctgctccattctccagtctgaacagttcagctacagtctgactctggacagggggtttctgttgcaaaaatacaaaacaaaagcgataaaataaaagcgattttcatttggtaggcggagagtgaattaccaacagggaattgggccttgggcctatgccatttctgttgtagtttggggcagtgcaggggacctgtgtggggtgtgaaccaaggcactactgccacctgccacagtaaagcatctgcacttgactcaatgctgcccgagccctcccttccccctatccaacctgggtaggtgggtaggggccacagttgctggatgtttatatagagagtaggttgatttattttacatgcttttgagttaatgttggaaaactaatcacaagcagtttctaaaccaaaaaatgacatgttgtaaaaggacaataaacgtt

SEQ ID NO: 106 - DNA, 3077 bp, Homo sapiens
  source 1..3077: mol_type = genomic DNA
agtctcagcgaagcgtctgcgaccgtcgtttgagtcgtcgctgccgctgccgctgccactgccactgccacctcgcggatcaggagccagcgttgttcgcccgacgcctcgctgccggtgggaggaagcgagagggaagccgcttgcgggtttgtcgccgctgctcgcccaccgcctggaagagccgagccccggcccagtcggtcgcttgccaccgctcgtagccgttacccgcgggccgccacagccgccggccgggagaggcgcgcgccatggcttctggagccgattcaaaaggtgatgacctatcaacagccattctcaaacagaagaaccgtcccaatcggttaattgttgatgaagccatcaatgaggacaacagtgtggtgtccttgtcccagcccaagatggatgaattgcagttgttccgaggtgacacagtgttgctgaaaggaaagaagagacgagaagctgtttgcatcgtcctttctgatgatacttgttctgatgagaagattcggatgaatagagttgttcggaataaccttcgtgtacgcctaggggatgtcatcagcatccagccatgccctgatgtgaagtacggcaaacgtatccatgtgctgcccattgatgacacagtggaaggcattactggtaatctcttcgaggtataccttaagccgtacttcctggaagcgtatcgacccatccggaaaggagacatttttcttgtccgtggtgggatgcgtgctgtggagttcaaagtggtggaaacagatcctagcccttattgcattgttgctccagacacagtgatccactgcgaaggggagcctatcaaacgagaggatgaggaagagtccttgaatgaagtagggtatgatgacattggtggctgcaggaagcagctagctcagataaaggagatggtggaactgcccctgagacatcctgccctctttaaggcaattggtgtgaagcctcctagaggaatcctgctttacggacctcctggaacaggaaagaccctgattgctcgagctgtagcaaatgagactggagccttcttcttcttgatcaatggtcctgagatcatgagcaaattggctggtgagtctgagagcaaccttcgtaaagcctttgaggaggctgagaagaatgctcctgccatcatcttcattgatgagctagatgccatcgctcccaaaagagagaaaactcatggcgaggtggagcggcgcattgtatcacagttgttgaccctcatggatggcctaaagcagagggcacatgtgattgttatggcagcaaccaacagacccaacagcattgacccagctctacggcgatttggtcgctttgacagggaggtagatattggaattcctgatgctacaggacgcttagagattcttcagatccataccaagaacatgaagctggcagatgatgtggacctggaacaggtagccaatgagactcacgggcatgtgggtgctgacttagcagccctgtgctcagaggctgctctgcaagccatccgcaagaagatggatctcattgacctagaggatgagaccattgatgccgaggtcatgaactctctagcagttactatggatgacttccggtgggccttgagccagagtaacccatcagcactgcgggaaaccgtggtagaggtgccacaggtaacctgggaagacatcgggggcctagaggatgtcaaacgtgagctacaggagctggtccagtatcctgtggagcacccagacaaattcctgaagtttggcatgacaccttccaagggagttctgttctatggacctcctggctgtgggaaaactttgttggccaaagccattgctaatgaatgccaggccaacttcatctccatcaagggtcctgagctgctcaccatgtggtttggggagtctgaggccaatgtcagagaaatctttgacaaggcccgccaagctgccccctgtgtgctattctttgatgagctggattcgattgccaaggctcgtggaggtaacattggagatggtggtggggctgctgaccgagtcatcaaccagatcctgacagaaatggatggcatgtccacaaaaaaaaatgtgttcatcattggcgctaccaaccggcctgacatcattgatcctgccatcctcagacctggccgtcttgatcagctcatctacatcccacttcctgatgagaagtcccgtgttgccatcctcaaggctaacctgcgcaagtccccagttgccaaggaggtagaagaggatgatccagtgcctgagatccgtcgagatcactttgaagaagccatgcgctttgcgcgccgttctgtcagtgacaatgacattcggaagtatgagatgtttgcccagacccttcagcagagtcggggctttggcagcttcagattcccttcagggaaccagggtggagctggccccagtcagggcagtggaggcggcacaggtggcagtgtatacacagaagacaatgatgatgacctgtatggctaagtggtggtggccagcgtgcagtgagctggcctgcctggaccttgttccctgggggtgggggcgcttgcccaggagagggaccaggggtgcgcccacagcctgctccattctccagtctgaacagttcagctacagtctgactctggacagggggtttctgttgcaaaaatacaaaacaaaagcgataaaataaaagcgattttcatttggtaggcggagagtgaattaccaacagggaattgggccttgggcctatgccatttctgttgtagtttggggcagtgcaggggacctgtgtggggtgtgaaccaaggcactactgccacctgccacagtaaagcatctgcacttgactcaatgctgcccgagccctcccttccccctatccaacctgggtaggtgggtaggggccacagttgctggatgtttatatagagagtaggttgatttattttacatgcttttgagttaatgttggaaaactaatcacaagcagtttctaaaccaaaaaatgacatgttgtaaaaggacaataaacgt

SEQ ID NO: 107 - DNA, 3382 bp, Homo sapiens
  source 1..3382: mol_type = genomic DNA
ggggcgagtgaggggccgtggacccggcaggcccggctggggccagctgcgcacccgcgcgccccctaggcggggcttgcgttgggtccgggtcggagcctgggccggatcgtgctgtgtcatgcaggccccggcccgcccgattggctcccttagaacggacgtctgggcctggccaggtcttccggcccactccgccggcgcggcgccccggggctttggggcgccagtctgccgtccggcctaccacccgccgaaagcctttggtccccggagagagcaggccccgcgagcccgaggccccagccgggcccggtgggcgtggactttgcgccatgtgaaggcctcaggagctctgccaccgaggcggagcccggggtcggggaaggcccgccgagctcagggaagctcacagccgcctttttggagccgggtcggcggggccggagttcaaaaggtgatgacctatcaacagccattctcaaacagaagaaccgtcccaatcggttaattgttgatgaagccatcaatgaggacaacagtgtggtgtccttgtcccagcccaagatggatgaattgcagttgttccgaggtgacacagtgttgctgaaaggaaagaagagacgagaagctgtttgcatcgtcctttctgatgatacttgttctgatgagaagattcggatgaatagagttgttcggaataaccttcgtgtacgcctaggggatgtcatcagcatccagccatgccctgatgtgaagtacggcaaacgtatccatgtgctgcccattgatgacacagtggaaggcattactggtaatctcttcgaggtataccttaagccgtacttcctggaagcgtatcgacccatccggaaaggagacatttttcttgtccgtggtgggatgcgtgctgtggagttcaaagtggtggaaacagatcctagcccttattgcattgttgctccagacacagtgatccactgcgaaggggagcctatcaaacgagaggatgaggaagagtccttgaatgaagtagggtatgatgacattggtggctgcaggaagcagctagctcagataaaggagatggtggaactgcccctgagacatcctgccctctttaaggcaattggtgtgaagcctcctagaggaatcctgctttacggacctcctggaacaggaaagaccctgattgctcgagctgtagcaaatgagactggagccttcttcttcttgatcaatggtcctgagatcatgagcaaattggctggtgagtctgagagcaaccttcgtaaagcctttgaggaggctgagaagaatgctcctgccatcatcttcattgatgagctagatgccatcgctcccaaaagagagaaaactcatggcgaggtggagcggcgcattgtatcacagttgttgaccctcatggatggcctaaagcagagggcacatgtgattgttatggcagcaaccaacagacccaacagcattgacccagctctacggcgatttggtcgctttgacagggaggtagatattggaattcctgatgctacaggacgcttagagattcttcagatccataccaagaacatgaagctggcagatgatgtggacctggaacaggtagccaatgagactcacgggcatgtgggtgctgacttagcagccctgtgctcagaggctgctctgcaagccatccgcaagaagatggatctcattgacctagaggatgagaccattgatgccgaggtcatgaactctctagcagttactatggatgacttccggtgggccttgagccagagtaacccatcagcactgcgggaaaccgtggtagaggtgccacaggtaacctgggaagacatcgggggcctagaggatgtcaaacgtgagctacaggagctggtccagtatcctgtggagcacccagacaaattcctgaagtttggcatgacaccttccaagggagttctgttctatggacctcctggctgtgggaaaactttgttggccaaagccattgctaatgaatgccaggccaacttcatctccatcaagggtcctgagctgctcaccatgtggtttggggagtctgaggccaatgtcagagaaatctttgacaaggcccgccaagctgccccctgtgtgctattctttgatgagctggattcgattgccaaggctcgtggaggtaacattggagatggtggtggggctgctgaccgagtcatcaaccagatcctgacagaaatggatggcatgtccacaaaaaaaaatgtgttcatcattggcgctaccaaccggcctgacatcattgatcctgccatcctcagacctggccgtcttgatcagctcatctacatcccacttcctgatgagaagtcccgtgttgccatcctcaaggctaacctgcgcaagtccccagttgccaaggatgtggacttggagttcctggctaaaatgactaatggcttctctggagctgacctgacagagatttgccagcgtgcttgcaagctggccatccgtgaatccatcgagagtgagattaggcgagaacgagagaggcagacaaacccatcagccatggaggtagaagaggatgatccagtgcctgagatccgtcgagatcactttgaagaagccatgcgctttgcgcgccgttctgtcagtgacaatgacattcggaagtatgagatgtttgcccagacccttcagcagagtcggggctttggcagcttcagattcccttcagggaaccagggtggagctggccccagtcagggcagtggaggcggcacaggtggcagtgtatacacagaagacaatgatgatgacctgtatggctaagtggtggtggccagcgtgcagtgagctggcctgcctggaccttgttccctgggggtgggggcgcttgcccaggagagggaccaggggtgcgcccacagcctgctccattctccagtctgaacagttcagctacagtctgactctggacagggggtttctgttgcaaaaatacaaaacaaaagcgataaaataaaagcgattttcatttggtaggcggagagtgaattaccaacagggaattgggccttgggcctatgccatttctgttgtagtttggggcagtgcaggggacctgtgtggggtgtgaaccaaggcactactgccacctgccacagtaaagcatctgcacttgactcaatgctgcccgagccctcccttccccctatccaacctgggtaggtgggtaggggccacagttgctggatgtttatatagagagtaggttgatttattttacatgcttttgagttaatgttggaaaactaatcacaagcagtttctaaaccaaaaaatgacatgttgtaaaagg

SEQ ID NO: 108 - DNA, 3264 bp, Homo sapiens
  source 1..3264: mol_type = genomic DNA
agtctcagcgaagcgtctgcgaccgtcgtttgagtcgtcgctgccgctgccgctgccactgccactgccacctcgcggatcaggagccagcgttgttcgcccgacgcctcgctgccggtgggaggaagcgagagggaagccgcttgcgggtttgtcgccgctgctcgcccaccgcctggaagagccgagccccggcccagtcggtcgcttgccaccgctcgtagccgttacccgcgggccgccacagccgccggccgggagaggcgcgcgccatggcttctggagccgattcaaaaggtgatgacctatcaacagccattctcaaacagaagaaccgtcccaatcggttaattgttgatgaagccatcaatgaggacaacagtgtggtgtccttgtcccagcccaagatggatgaattgcagttgttccgaggtgacacagtgttgctgaaaggaaagaagagacgagaagctgtttgcatcgtcctttctgatgatacttgttctgatgagaagattcggatgaatagagttgttcggaataaccttcgtgtacgcctaggggatgtcatcagcatccagccatgccctgatgtgaagtacggcaaacgtatccatgtgctgcccattgatgacacagtggaaggcattactggtaatctcttcgaggtataccttaagccgtacttcctggaagcgtatcgacccatccggaaaggagacatttttcttgtccgtggtgggatgcgtgctgtggagttcaaagtggtggaaacagatcctagcccttattgcattgttgctccagacacagtgatccactgcgaaggggagcctatcaaacgagaggatgaggaagagtccttgaatgaagtagggtatgatgacattggtggctgcaggaagcagctagctcagataaaggagatggtggaactgcccctgagacatcctgccctctttaaggcaattggtgtgaagcctcctagaggaatcctgctttacggacctcctggaacaggaaagaccctgattgctcgagctgtagcaaatgagactggagccttcttcttcttgatcaatggtcctgagatcatgagcaaattggctggtgagtctgagagcaaccttcgtaaagcctttgaggaggctgagaagaatgctcctgccatcatcttcattgatgagctagatgccatcgctcccaaaagagagaaaactcatggcgaggtggagcggcgcattgtatcacagttgttgaccctcatggatggcctaaagcagagggcacatgtgattgttatggcagcaaccaacagacccaacagcattgacccagctctacggcgatttggtcgctttgacagggaggtagatattggaattcctgatgctacaggacgcttagagattcttcagatccataccaagaacatgaagctggcagatgatgtggacctggaacaggtagccaatgagactcacgggcatgtgggtgctgacttagcagccctgtgctcagaggctgctctgcaagccatccgcaagaagatggatctcattgacctagaggatgagaccattgatgccgaggtcatgaactctctagcagttactatggatgacttccggtgggccttgagccagagtaacccatcagcactgcgggaaaccgtggtagaggtgccacaggtaacctgggaagacatcgggggcctagaggatgtcaaacgtgagctacaggagctggtccagtatcctgtggagcacccagacaaattcctgaagtttggcatgacaccttccaagggagttctgttctatggacctcctggctgtgggaaaactttgttggccaaagccattgctaatgaatgccaggccaacttcatctccatcaagggtcctgagctgctcaccatgtggtttggggagtctgaggccaatgtcagagaaatctttgacaaggcccgccaagctgccccctgtgtgctattctttgatgagctggattcgattgccaaggctcgtggaggtaacattggagatggtggtggggctgctgaccgagtcatcaaccagatcctgacagaaatggatggcatgtccacaaaaaaaaatgtgttcatcattggcgctaccaaccggcctgacatcattgatcctgccatcctcagacctggccgtcttgatcagctcatctacatcccacttcctgatgagaagtcccgtgttgccatcctcaaggctaacctgcgcaagtccccagttgccaaggcaggtgcaagatcatgggctgtgggagacttgcatgagtcctcaggctggatgtggacttggagttcctggctaaaatgactaatggcttctctggagctgacctgacagagatttgccagcgtgcttgcaagctggccatccgtgaatccatcgagagtgagattaggcgagaacgagagaggcagacaaacccatcagccatggaggtagaagaggatgatccagtgcctgagatccgtcgagatcactttgaagaagccatgcgctttgcgcgccgttctgtcagtgacaatgacattcggaagtatgagatgtttgcccagacccttcagcagagtcggggctttggcagcttcagattcccttcagggaaccagggtggagctggccccagtcagggcagtggaggcggcacaggtggcagtgtatacacagaagacaatgatgatgacctgtatggctaagtggtggtggccagcgtgcagtgagctggcctgcctggaccttgttccctgggggtgggggcgcttgcccaggagagggaccaggggtgcgcccacagcctgctccattctccagtctgaacagttcagctacagtctgactctggacagggggtttctgttgcaaaaatacaaaacaaaagcgataaaataaaagcgattttcatttggtaggcggagagtgaattaccaacagggaattgggccttgggcctatgccatttctgttgtagtttggggcagtgcaggggacctgtgtggggtgtgaaccaaggcactactgccacctgccacagtaaagcatctgcacttgactcaatgctgcccgagccctcccttccccctatccaacctgggtaggtgggtaggggccacagttgctggatgtttatatagagagtaggttgatttattttacatgcttttgagttaatgttggaaaactaatcacaagcagtttctaaaccaaaaaatgacatgtt

SEQ ID NO: 109 - DNA, 5506 bp, Homo sapiens
  source 1..5506: mol_type = genomic DNA
tctcagcgaagcgtctgcgaccgtcgtttgagtcgtcgctgccgctgccgctgccactgccactgccacctcgcggatcaggagccagcgttgttcgcccgacgcctcgctgccggtgggaggaagcgagagggaagccgcttgcgggtttgtcgccgctgctcgcccaccgcctggaagagccgagccccggcccagtcggtcgcttgccaccgctcgtagccgttacccgcgggccgccacagccgccggccgggagaggcgcgcgccatggcttctggagccgattcaaaaggtgatgacctatcaacagccattctcaaacagaagaaccgtcccaatcggttaattgttgatgaagccatcaatgaggacaacagtgtggtgtccttgtcccagcccaagatggatgaattgcagttgttccgaggtgacacagtgttgctgaaaggaaagaagagacgagaagctgtttgcatcgtcctttctgatgatacttgttctgatgagaagattcggatgaatagagttgttcggaataaccttcgtgtacgcctaggggatgtcatcagcatccagccatgccctgatgtgaagtacggcaaacgtatccatgtgctgcccattgatgacacagtggaaggcattactggtaatctcttcgaggtataccttaagccgtacttcctggaagcgtatcgacccatccggaaaggagacatttttcttgtccgtggtgggatgcgtgctgtggagttcaaagtggtggaaacagatcctagcccttattgcattgttgctccagacacagtgatccactgcgaaggggagcctatcaaacgagaggatgaggaagagtccttgaatgaagtagggtatgatgacattggtggctgcaggaagcagctagctcagataaaggagatggtggaactgcccctgagacatcctgccctctttaaggcaattggtgtgaagcctcctagaggaatcctgctttacggacctcctggaacaggaaagaccctgattgctcgagctgtagcaaatgagactggagccttcttcttcttgatcaatggtcctgagatcatgagcaaattggctggtgagtctgagagcaaccttcgtaaagcctttgaggaggctgagaagaatgctcctgccatcatcttcattgatgagctagatgccatcgctcccaaaagagagaaaactcatggcgaggtggagcggcgcattgtatcacagttgttgaccctcatggatggcctaaagcagagggcacatgtgattgttatggcagcaaccaacagacccaacagcattgacccagctctacggcgatttggtcgctttgacagggaggtagatattggaattcctgatgctacaggacgcttagagattcttcagatccataccaagaacatgaagctggcagatgatgtggacctggaacaggtagccaatgagactcacgggcatgtgggtgctgacttagcagccctgtgctcagaggctgctctgcaagccatccgcaagaagatggatctcattgacctagaggatgagaccattgatgccgaggtcatgaactctctagcagttactatggatgacttccggtgggccttgagccagagtaacccatcagcactgcgggaaaccgtggtagaggtgccacaggtaacctgggaagacatcgggggcctagaggatgtcaaacgtgagctacaggagctggtccaggtagggcaacttggtccagggtgagtcactgtctcagtacattgtaattgatctgggtgatctcagggtgtcaacacatttgctgcaagagttgtgagagcacgacttaggaacctactgttcttaggtttgaggcactaaggagtcttcttctagagaacctggatctgataccattgggtacaccatgaaataatggaggggatgcttctgtttagttaggtttctttcaaaatgtggaggtagccttgaaccctctttccttttcctcctagtatcctgtggagcacccagacaaattcctgaagtttggcatgacaccttccaagggagttctgttctatggacctcctggctgtgggaaaactttgttggccaaagccattgctaatgaatgccaggccaacttcatctccatcaagggtcctgagctgctcaccatgtggtttggggagtctgaggccaatgtcagagaaatctttgacaaggtgagctacaataggctgaactatgtattgatttgcctgagggcaaggaatagaggctgtttttctttaagagggttgaaatattcttagtgctggctgctcaactgcacagtaagtcacttgattttctttctgaggtctgagagacctagtgttattttttttttctctctctctctcttgagacagggtctggctctgttgcccaggttggagggcagtggtacagtcatggctcactgtaaccttgaaacctgggcttaagcaattctcctacttcagcctcctgagtagctgggactataggcatgcgtcaccacatctggctaattttttattttttgtagagacaaagtctcagtatgttgcccatgctggtttcggatttctggcctcaagtgatcctcccaccttggcctcccaaagtgctgggaatacaggtgtgagccaccacgtttgcctagagacatctagttttgttagtgcttgaatcaatccattcctcctacaggcccgccaagctgccccctgtgtgctattctttgatgagctggattcgattgccaaggctcgtggaggtaacattggagatggtggtggggctgctgaccgagtcatcaaccagatcctgacagaaatggatggcatgtccacaaaaaaaaatgtgttcatcattggcgctaccaaccggcctgacatcattgatcctgccatcctcagacctggccgtcttgatcagctcatctacatcccacttcctgatgagaagtcccgtgttgccatcctcaaggctaacctgcgcaagtccccagttgccaaggatgtggacttggagttcctggctaaaatgactaatggcttctctggagctgacctgacagagatttgccagcgtgcttgcaagctggccatccgtgaatccatcgagagtgagattaggcgagaacgagagaggcagacaaacccatcagccatggtgagtctgcatcctttccccagatgtgccaatcatggagagccaggcagcagccaccaccatgccctggagttgagagtagaagctgttggaaagatcatctaactgagaagaattttaatagggcatcaaagataaagaatgctgaggtgaatccattcaatttggaataaggccgagaagagatggtcaggctccattctcagtctgaaccaagctccatgagggaaatcaaagtatgagagtgcagcaaacacagcaaggttttttttgttttttgttttttgttttttttttgagacgaagtctcactctgttgcccagactggagtgcagtggcacgatcttggctcactgcaacttctgcctcccaggttcaagcgattctcctgcctcagcctcccgagtagctgggactacaggcacatgccaccatgtccggctagttttttgtattttttttttagtagaaacgtggtttcaccacgttagccaggatggtctcgatctcctgaccttgtgatgtgcccacctcggcctcccaaagtgctgggattacaggcgtgaaccacagagcaaggttttgagctgagatgagactcatatacttatccctgatggttggggaagggatagggtccacagacctcccaaaatgaaaaggcaaattcatgtgtttgtaagttccataaaggtaagatctctgtcatctcacttgttttccactatgtcttgtgttacccttaattaattcattaagttccaaacatgggacttaatgagcaaataaatggctttctttcccttttgaagggtctgtgacatcccttctctctcccataaaagcttaacaactactgatgaactaatcctaggaggtagtcacataagtcacagaaattggcctctcaatggaagagataggttttgagctgggctgtgaagagagtagaatttgaataaagggaataagcagcccaaataatgtgctctagtagtaggattgcaatcattgggaaaccctgggtagatttaagagtatatatgtcactggaagtgagaccgctaggtaggatgtaatccaaatgtggtaagcactgaaagccattggcatttccttttaaagtattaaggtttattaaggtatgatataaatacaataaaattcactctttctatataccatttccatgctttatgacaagtgtgtgtaagttctataactactaccacagttgagacttaaaatttctactatctcaaaaagtttccttagccacttcagtcaacatctcccctccttaagccccatcactgatgtgatttctgtccctacagttttcccttttccagagtgcattgacaagtttttaagcagagcagtgactcaattttaggaagcatggcctagcatcttacctcaggttggattggaagggcaaggagaccaataaactgcagtaatgggaggcctgggatgaaatccaggctgggctttaactagccctagtgatctgtgtttaccaactataggaggtagaagaggatgatccagtgcctgagatccgtcgagatcactttgaagaagccatgcgctttgcgcgccgttctgtcagtgacaatgacattcggaagtatgagatgtttgcccagacccttcagcagagtcggggctttggcagcttcagattcccttcagggaaccagggtggagctggccccagtcagggcagtggaggcggcacaggtggcagtgtatacacagaagacaatgatgatgacctgtatggctaagtggtggtggccagcgtgcagtgagctggcctgcctggaccttgttccctgggggtgggggcgcttgcccaggagagggaccaggggtgcgcccacagcctgctccattctccagtctgaacagttcagctacagtctgactctggacagggggtttctgttgcaaaaatacaaaacaaaagcgataaaataaaagcgattttcatttggtaggcggagagtgaattaccaacagggaattgggccttgggcctatgccatttctgttgtagtttggggcagtgcaggggacctgtgtggggtgtgaaccaaggcactactgccacctgccacagtaaagcatctgcacttgactcaatgctgcccgagccctcccttccccctatccaacctgggtaggtgggtaggggccacagttgctggatgtttatatagagagtaggttgatttattttacatgcttttgagttaatgttggaaaactaatcacaagcag

SEQ ID NO: 110 - DNA, 3159 bp, Homo sapiens
  source 1..3159: mol_type = genomic DNA
gtctgcgaccgtcgtttgagtcgtcgctgccgctgccgctgccactgccactgccacctcgcggatcaggagccagcgttgttcgcccgacgcctcgctgccggtgggaggaagcgagagggaagccgcttgcgggtttgtcgccgctgctcgcccaccgcctggaagagccgagccccggcccagtcggtcgcttgccaccgctcgtagccgttacccgcgggccgccacagccgccggccgggagaggcgcgcgccatggcttctggagccgattcaaaaggtgatgacctatcaacagccattctcaaacagaagaaccgtcccaatcggttaattgttgatgaagccatcaatgaggacaacagtgtggtgtccttgtcccagcccaagatggatgaattgcagttgttccgaggtgacacagtgttgctgaaaggaaagaagagacgagaagctgtttgcatcgtcctttctgatgatacttgttctgatgagaagattcggatgaatagagttgttcggaataaccttcgtgtacgcctaggggatgtcatcagcatccagccatgccctgatgtgaagtacggcaaacgtatccatgtgctgcccattgatgacacagtggaaggcattactggtaatctcttcgaggtataccttaagccgtacttcctggaagcgtatcgacccatccggaaaggagacatttttcttgtccgtggtgggatgcgtgctgtggagttcaaagtggtggaaacagatcctagcccttattgcattgttgctccagacacagtgatccactgcgaaggggagcctatcaaacgagaggatgaggaagagtccttgaatgaagtagggtatgatgacattggtggctgcaggaagcagctagctcagataaaggagatggtggaactgcccctgagacatcctgccctctttaaggcaattggtgtgaagcctcctagaggaatcctgctttacggacctcctggaacaggaaagaccctgattgctcgagctgtagcaaatgagactggagccttcttcttcttgatcaatggtcctgagatcatgagcaaattggctggtgagtctgagagcaaccttcgtaaagcctttgaggaggctgagaagaatgctcctgccatcatcttcattgatgagctagatgccatcgctcccaaaagagagaaaactcatggcgaggtggagcggcgcattgtatcacagttgttgaccctcatggatggcctaaagcagagggcacatgtgattgttatggcagcaaccaacagacccaacagcattgacccagctctacggcgatttggtcgctttgacagggaggtagatattggaattcctgatgctacaggacgcttagagattcttcagatccataccaagaacatgaagctggcagatgatgtggacctggaacaggtagccaatgagactcacgggcatgtgggtgctgacttagcagccctgtgctcagaggctgctctgcaagccatccgcaagaagatggatctcattgacctagaggatgagaccattgatgccgaggtcatgaactctctagcagttactatggatgacttccggtgggccttgagccagagtaacccatcagcactgcgggaaaccgtggtagaggtgccacaggtaacctgggaagacatcgggggcctagaggatgtcaaacgtgagctacaggagctggtccagtatcctgtggagcacccagacaaattcctgaagtttggcatgacaccttccaagggagttctgttctatggacctcctggctgtgggaaaactttgttggccaaagccattgctaatgaatgccaggccaacttcatctccatcaagggtcctgagctgctcaccatgtggtttggggagtctgaggccaatgtcagagaaatctttgacaaggcccgccaagctgccccctgtgtgctattctttgatgagctggattcgattgccaaggctcgtggaggtaacattggagatggtggtggggctgctgaccgagtcatcaaccagatcctgacagaaatggatggcatgtccacaaaaaaaaatgtgttcatcattggcgctaccaaccggcctgacatcattgatcctgccatcctcagacctggccgtcttgatcagctcatctacatcccacttcctgatgagaagtcccgtgttgccatcctcaaggctaacctgcgcaagtccccagttgccaaggatgtggacttggagttcctggctaaaatgactaatggcttctctggagctgacctgacagagatttgccagcgtgcttgcaagctggccatccgtgaatccatcgagagtgagattaggcgagaacgagagaggcagacaaacccatcagccatggtagaagaggatgatccagtgcctgagatccgtcgagatcactttgaagaagccatgcgctttgcgcgccgttctgtcagtgacaatgacattcggaagtatgagatgtttgcccagacccttcagcagagtcggggctttggcagcttcagattcccttcagggaaccagggtggagctggccccagtcagggcagtggaggcggcacaggtggcagtgtatacacagaagacaatgatgatgacctgtatggctaagtggtggtggccagcgtgcagtgagctggcctgcctggaccttgttccctgggggtgggggcgcttgcccaggagagggaccaggggtgcgcccacagcctgctccattctccagtctgaacagttcagctacagtctgactctggacagggggtttctgttgcaaaaatacaaaacaaaagcgataaaataaaagcgattttcatttggtaggcggagagtgaattaccaacagggaattgggccttgggcctatgccatttctgttgtagtttggggcagtgcaggggacctgtgtggggtgtgaaccaaggcactactgccacctgccacagtaaagcatctgcacttgactcaatgctgcccgagccctcccttccccctatccaacctgggtaggtgggtaggggccacagttgctggatgtttatatagagagtaggttgatttattttacatgcttttgagttaatgttggaaaac

SEQ ID NO: 111 - DNA, 4691 bp, Homo sapiens
  source 1..4691: mol_type = genomic DNA
agtctcagcgaagcgtctgcgaccgtcgtttgagtcgtcgctgccgctgccgctgccactgccactgccacctcgcggatcaggagccagcgttgttcgcccgacgcctcgctgccggtgggaggaagcgagagggaagccgcttgcgggtttgtcgccgctgctcgcccaccgcctggaagagccgagccccggcccagtcggtcgcttgccaccgctcgtagccgttacccgcgggccgccacagccgccggccgggagaggcgcgcgccatggcttctggagccgattcaaaaggtgatgacctatcaacagccattctcaaacagaagaaccgtcccaatcggttaattgttgatgaagccatcaatgaggacaacagtgtggtgtccttgtcccagcccaagatggatgaattgcagttgttccgaggtgacacagtgttgctgaaaggaaagaagagacgagaagctgtttgcatcgtcctttctgatgatacttgttctgatgagaagattcggatgaatagagttgttcggaataaccttcgtgtacgcctaggggatgtcatcagcatccagccatgccctgatgtgaagtacggcaaacgtatccatgtgctgcccattgatgacacagtggaaggcattactggtaatctcttcgaggtataccttaagccgtacttcctggaagcgtatcgacccatccggaaaggagacatttttcttgtccgtggtgggatgcgtgctgtggagttcaaagtggtggaaacagatcctagcccttattgcattgttgctccagacacagtgatccactgcgaaggggagcctatcaaacgagaggatgaggaagagtccttgaatgaagtagggtatgatgacattggtggctgcaggaagcagctagctcagataaaggagatggtggaactgcccctgagacatcctgccctctttaaggcaattggtgtgaagcctcctagaggaatcctgctttacggacctcctggaacaggaaagaccctgattgctcgagctgtagcaaatgagactggagccttcttcttcttgatcaatggtcctgagatcatgagcaaattggctggtgagtctgagagcaaccttcgtaaagcctttgaggaggctgagaagaatgctcctgccatcatcttcattgatgagctagatgccatcgctcccaaaagagagaaaactcatggcgaggtggagcggcgcattgtatcacagttgttgaccctcatggatggcctaaagcagagggcacatgtgattgttatggcagcaaccaacagacccaacagcattgacccagctctacggcgatttggtcgctttgacagggaggtagatattggaattcctgatgctacaggacgcttagagattcttcagatccataccaagaacatgaagctggcagatgatgtggacctggaacaggtagccaatgagactcacgggcatgtgggtgctgacttagcagccctgtgctcagaggctgctctgcaagccatccgcaagaagatggatctcattgacctagaggatgagaccattgatgccgaggtcatgaactctctagcagttactatggatgacttccggtgggccttgagccagagtaacccatcagcactgcgggaaaccgtggtagaggtgccacaggtaacctgggaagacatcgggggcctagaggatgtcaaacgtgagctacaggagctggtccagtatcctgtggagcacccagacaaattcctgaagtttggcatgacaccttccaagggagttctgttctatggacctcctggctgtgggaaaactttgttggccaaagccattgctaatgaatgccaggccaacttcatctccatcaagggtcctgagctgctcaccatgtggtttggggagtctgaggccaatgtcagagaaatctttgacaaggcccgccaagctgccccctgtgtgctattctttgatgagctggattcgattgccaaggctcgtggaggtaacattggagatggtggtggggctgctgaccgagtcatcaaccagatcctgacagaaatggatggcatgtccacaaaaaaaaatgtgttcatcattggcgctaccaaccggcctgacatcattgatcctgccatcctcagacctggccgtcttgatcagctcatctacatcccacttcctgatgagaagtcccgtgttgccatcctcaaggctaacctgcgcaagtccccagttgccaaggatgtggacttggagttcctggctaaaatgactaatggcttctctggagctgacctgacagagatttgccagcgtgcttgcaagctggccatccgtgaatccatcgagagtgagattaggcgagaacgagagaggcagacaaacccatcagccatggtgagtctgcatcctttccccagatgtgccaatcatggagagccaggcagcagccaccaccatgccctggagttgagagtagaagctgttggaaagatcatctaactgagaagaattttaatagggcatcaaagataaagaatgctgaggtgaatccattcaatttggaataaggccgagaagagatggtcaggctccattctcagtctgaaccaagctccatgagggaaatcaaagtatgagagtgcagcaaacacagcaaggttttttttgttttttgttttttgttttttttttgagacgaagtctcactctgttgcccagactggagtgcagtggcacgatcttggctcactgcaacttctgcctcccaggttcaagcgattctcctgcctcagcctcccgagtagctgggactacaggcacatgccaccatgtccggctagttttttgtattttttttttagtagaaacgtggtttcaccacgttagccaggatggtctcgatctcctgaccttgtgatgtgcccacctcggcctcccaaagtgctgggattacaggcgtgaaccacagagcaaggttttgagctgagatgagactcatatacttatccctgatggttggggaagggatagggtccacagacctcccaaaatgaaaaggcaaattcatgtgtttgtaagttccataaaggtaagatctctgtcatctcacttgttttccactatgtcttgtgttacccttaattaattcattaagttccaaacatgggacttaatgagcaaataaatggctttctttcccttttgaagggtctgtgacatcccttctctctcccataaaagcttaacaactactgatgaactaatcctaggaggtagtcacataagtcacagaaattggcctctcaatggaagagataggttttgagctgggctgtgaagagagtagaatttgaataaagggaataagcagcccaaataatgtgctctagtagtaggattgcaatcattgggaaaccctgggtagatttaagagtatatatgtcactggaagtgagaccgctaggtaggatgtaatccaaatgtggtaagcactgaaagccattggcatttccttttaaagtattaaggtttattaaggtatgatataaatacaataaaattcactctttctatataccatttccatgctttatgacaagtgtgtgtaagttctataactactaccacagttgagacttaaaatttctactatctcaaaaagtttccttagccacttcagtcaacatctcccctccttaagccccatcactgatgtgatttctgtccctacagttttcccttttccagagtgcattgacaagtttttaagcagagcagtgactcaattttaggaagcatggcctagcatcttacctcaggttggattggaagggcaaggagaccaataaactgcagtaatgggaggcctgggatgaaatccaggctgggctttaactagccctagtgatctgtgtttaccaactataggaggtagaagaggatgatccagtgcctgagatccgtcgagatcactttgaagaagccatgcgctttgcgcgccgttctgtcagtgacaatgacattcggaagtatgagatgtttgcccagacccttcagcagagtcggggctttggcagcttcagattcccttcagggaaccagggtggagctggccccagtcagggcagtggaggcggcacaggtggcagtgtatacacagaagacaatgatgatgacctgtatggctaagtggtggtggccagcgtgcagtgagctggcctgcctggaccttgttccctgggggtgggggcgcttgcccaggagagggaccaggggtgcgcccacagcctgctccattctccagtctgaacagttcagctacagtctgactctggacagggggtttctgttgcaaaaatacaaaacaaaagcgataaaataaaagcgattttcatttggtaggcggagagtgaattaccaacagggaattgggccttgggcctatgccatttctgttgtagtttggggcagtgcaggggacctgtgtggggtgtgaaccaaggcactactgccacctgccacagtaaagcatctgcacttgactcaatgctgcccgagccctcccttccccctatccaacctgggtaggtgggtaggggccacagttgctggatgtttatatagagagtaggttgatttattttacatgctttt

SEQ ID NO: 112 - DNA, 2987 bp, Homo sapiens
  source 1..2987: mol_type = genomic DNA
gccgagccccggcccagtcggtcgcttgccaccgctcgtagccgttacccgcgggccgccacagccgccggccgggagaggcgcgcgccatggcttctggagccgattcaaaaggtgatgacctatcaacagccattctcaaacagaagaaccgtcccaatcggttaattgttgatgaagccatcaatgaggacaacagtgtggtgtccttgtcccagcccaagatggatgaattgcagttgttccgaggtgacacagtgttgctgaaaggaaagaagagacgagaagctgtttgcatcgtcctttctgatgatacttgttctgatgagaagattcggatgaatagagttgttcggaataaccttcgtgtacgcctaggggatgtcatcagcatccagccatgccctgatgtgaagtacggcaaacgtatccatgtgctgcccattgatgacacagtggaaggcattactggtaatctcttcgaggtataccttaagccgtacttcctggaagcgtatcgacccatccggaaaggagacatttttcttgtccgtggtgggatgcgtgctgtggagttcaaagtggtggaaacagatcctagcccttattgcattgttgctccagacacagtgatccactgcgaaggggagcctatcaaacgagaggatgaggaagagtccttgaatgaagtagggtatgatgacattggtggctgcaggaagcagctagctcagataaaggagatggtggaactgcccctgagacatcctgccctctttaaggcaattggtgtgaagcctcctagaggaatcctgctttacggacctcctggaacaggaaagaccctgattgctcgagctgtagcaaatgagactggagccttcttcttcttgatcaatggtcctgagatcatgagcaaattggctggtgagtctgagagcaaccttcgtaaagcctttgaggaggctgagaagaatgctcctgccatcatcttcattgatgagctagatgccatcgctcccaaaagagagaaaactcatggcgaggtggagcggcgcattgtatcacagttgttgaccctcatggatggcctaaagcagagggcacatgtgattgttatggcagcaaccaacagacccaacagcattgacccagctctacggcgatttggtcgctttgacagggaggtagatattggaattcctgatgctacaggacgcttagagattcttcagatccataccaagaacatgaagctggcagatgatgtggacctggaacaggtagccaatgagactcacgggcatgtgggtgctgacttagcagccctgtgctcagaggctgctctgcaagccatccgcaagaagatggatctcattgacctagaggatgagaccattgatgccgaggtcatgaactctctagcagttactatggatgacttccggttttccctccttttctagtgggccttgagccagagtaacccatcagcactgcgggaaaccgtggtagaggtgccacaggtaacctgggaagacatcgggggcctagaggatgtcaaacgtgagctacaggagctggtccagtatcctgtggagcacccagacaaattcctgaagtttggcatgacaccttccaagggagttctgttctatggacctcctggctgtgggaaaactttgttggccaaagccattgctaatgaatgccaggccaacttcatctccatcaagggtcctgagctgctcaccatgtggtttggggagtctgaggccaatgtcagagaaatctttgacaaggcccgccaagctgccccctgtgtgctattctttgatgagctggattcgattgccaaggctcgtggaggtaacattggagatggtggtggggctgctgaccgagtcatcaaccagatcctgacagaaatggatggcatgtccacaaaaaaaaatgtgttcatcattggcgctaccaaccggcctgacatcattgatcctgccatcctcagacctggccgtcttgatcagctcatctacatcccacttcctgatgagaagtcccgtgttgccatcctcaaggctaacctgcgcaagtccccagttgccaaggatgtggacttggagttcctggctaaaatgactaatggcttctctggagctgacctgacagagatttgccagcgtgcttgcaagctggccatccgtgaatccatcgagagtgagattaggcgagaacgagagaggcagacaaacccatcagccatggaggtagaagaggatgatccagtgcctgagatccgtcgagatcactttgaagaagccatgcgctttgcgcgccgttctgtcagtgacaatgacattcggaagtatgagatgtttgcccagacccttcagcagagtcggggctttggcagcttcagattcccttcagggaaccagggtggagctggccccagtcagggcagtggaggcggcacaggtggcagtgtatacacagaagacaatgatgatgacctgtatggctaagtggtggtggccagcgtgcagtgagctggcctgcctggaccttgttccctgggggtgggggcgcttgcccaggagagggaccaggggtgcgcccacagcctgctccattctccagtctgaacagttcagctacagtctgactctggacagggggtttctgttgcaaaaatacaaaacaaaagcgataaaataaaagcgattttcatttggtaggcggagagtgaattaccaacagggaattgggccttgggcctatgccatttctgttgtagtttggggcagtgcaggggacctgtgtggggtgtgaaccaaggcactactgccacctgccacagtaaagcatctgcacttgactcaatgctgcccgagccctcccttccccctatccaacctgggtaggtgggtaggggccacagttgctggatgtttatatagagagtaggttgatttattttacat

SEQ ID NO: 113 - DNA, 3597 bp, Homo sapiens
  source 1..3597: mol_type = genomic DNA
gaagcgtctgcgaccgtcgtttgagtcgtcgctgccgctgccgctgccactgccactgccacctcgcggatcaggagccagcgttgttcgcccgacgcctcgctgccggtgggaggaagcgagagggaagccgcttgcgggtttgtcgccgctgctcgcccaccgcctggaagagccgagccccggcccagtcggtcgcttgccaccgctcgtagccgttacccgcgggccgccacagccgccggccgggagaggcgcgcgccatggcttctggagccgattcaaaaggtgatgacctatcaacagccattctcaaacagaagaaccgtcccaatcggttaattgttgatgaagccatcaatgaggacaacagtgtggtgtccttgtcccagcccaagatggatgaattgcagttgttccgaggtgacacagtgttgctgaaaggaaagaagagacgagaagctgtttgcatcgtcctttctgatgatacttgttctgatgagaagattcggatgaatagagttgttcggaataaccttcgtgtacgcctaggggatgtcatcagctatctgtgccaggcccttttggacacccagtgcttgggcccgaagtgtggttggtaatatggagtctgcttgtcatcctcagcatccagccatgccctgatgtgaagtacggcaaacgtatccatgtgctgcccattgatgacacagtggaaggcattactggtaatctcttcgaggtataccttaagccgtacttcctggaagcgtatcgacccatccggaaaggagacatttttcttgtccgtggtgggatgcgtgctgtggagttcaaagtggtggaaacagatcctagcccttattgcattgttgctccagacacagtgatccactgcgaaggggagcctatcaaacgagaggatgaggaagagtccttgaatgaagtagggtatgatgacattggtggctgcaggaagcagctagctcagataaaggagatggtggaactgcccctgagacatcctgccctctttaaggcaattggtgtgaagcctcctagaggaatcctgctttacggacctcctggaacaggaaagaccctgattgctcgagctgtagcaaatgagactggagccttcttcttcttgatcaatggtcctgagatcatgagcaaattggctggtgagtctgagagcaaccttcgtaaagcctttgaggaggctgagaagaatgctcctgccatcatcttcattgatgagctagatgccatcgctcccaaaagagagaaaactcatggcgaggtggagcggcgcattgtatcacagttgttgaccctcatggatggcctaaagcagagggcacatgtgattgttatggcagcaaccaacagacccaacagcattgacccagctctacggcgatttggtcgctttgacagggaggtagatattggaattcctgatgctacaggacgcttagagattcttcagatccataccaagaacatgaagctggcagatgatgtggacctggaacaggtgaagtgatgatgatggctgaccaggcgttacagtgtctctaggcagttgctgggaactggctagagacataaggttaagatgtgaggagatgggttttgatttctggacaggggaaaggaagtaatctgagattgaatccaggaaatgggagttggcatttttcatagttgacgctgcatttagagtaaatcagaattgttggagcagccttatttctaggtcccaagtccagaattaagtacttaaaacccagcccataaaggtattgatagtatatattcaaggaaatgagaggacccagggatagcagtcaggggaaggattctattgtctctgagcctcctgcagcagctgggtctttgaggcagcatagtaagtagatctttctctgcaggtagccaatgagactcacgggcatgtgggtgctgacttagcagccctgtgctcagaggctgctctgcaagccatccgcaagaagatggatctcattgacctagaggatgagaccattgatgccgaggtcatgaactctctagcagttactatggatgacttccggtgggccttgagccagagtaacccatcagcactgcgggaaaccgtggtagaggtgccacaggtaacctgggaagacatcgggggcctagaggatgtcaaacgtgagctacaggagctggtccagtatcctgtggagcacccagacaaattcctgaagtttggcatgacaccttccaagggagttctgttctatggacctcctggctgtgggaaaactttgttggccaaagccattgctaatgaatgccaggccaacttcatctccatcaagggtcctgagctgctcaccatgtggtttggggagtctgaggccaatgtcagagaaatctttgacaaggcccgccaagctgccccctgtgtgctattctttgatgagctggattcgattgccaaggctcgtggaggtaacattggagatggtggtggggctgctgaccgagtcatcaaccagatcctgacagaaatggatggcatgtccacaaaaaaaaatgtgttcatcattggcgctaccaaccggcctgacatcattgatcctgccatcctcagacctggccgtcttgatcagctcatctacatcccacttcctgatgagaagtcccgtgttgccatcctcaaggctaacctgcgcaagtccccagttgccaaggatgtggacttggagttcctggctaaaatgactaatggcttctctggagctgacctgacagagatttgccagcgtgcttgcaagctggccatccgtgaatccatcgagagtgagattaggcgagaacgagagaggcagacaaacccatcagccatggaggtagaagaggatgatccagtgcctgagatccgtcgagatcactttgaagaagccatgcgctttgcgcgccgttctgtcagtgacaatgacattcggaagtatgagatgtttgcccagacccttcagcagagtcggggctttggcagcttcagattcccttcagggaaccagggtggagctggccccagtcagggcagtggaggcggcacaggtggcagtgtatacacagaagacaatgatgatgacctgtatggctaagtggtggtggccagcgtgcagtgagctggcctgcctggaccttgttccctgggggtgggggcgcttgcccaggagagggaccaggggtgcgcccacagcctgctccattctccagtctgaacagttcagctacagtctgactctggacagggggtttctgttgcaaaaatacaaaacaaaagcgataaaataaaagcgattttcatttggtaggcggagagtgaattaccaacagggaattgggccttgggcctatgccatttctgttgtagtttggggcagtgcaggggacctgtgtggggtgtgaaccaaggcactactgccacctgccacagtaaagcatctgcacttgactcaatgctgcccgagccctcccttccccctatccaacctgggtaggtgggtaggggccacagttgctggatgtttatat

SEQ ID NO: 114 - DNA, 2942 bp, Homo sapiens
  source 1..2942: mol_type = genomic DNA
ggatcaggagccagcgttgttcgcccgacgcctcgctgccggtgggaggaagcgagagggaagccgcttgcgggtttgtcgccgctgctcgcccaccgcctggaagagccgagccccggcccagtcggtcgcttgccaccgctcgtagccgttacccgcgggccgccacagccgccggccgggagaggcgcgcgccatggcttctggagccgattcaaaaggtgatgacctatcaacagccattctcaaacagaagaaccgtcccaatcggttaattgttgatgaagccatcaatgaggacaacagtgtggtgtccttgtcccagcccaagatggatgaattgcagttgttccgaggtgacacagtgttgctgaaaggaaagaagagacgagaagctgtttgcatcgtcctttctgatgatacttgttctgatgagaagattcggatgaatagagttgttcggaataaccttcgtgtacgcctaggggatgtcatcagcatccagccatgccctgatgtgaagtacggcaaacgtatccatgtgctgcccattgatgacacagtggaaggcattactggtaatctcttcgaggtataccttaagccgtacttcctggaagcgtatcgacccatccggaaaggagacatttttcttgtccgtggtgggatgcgtgctgtggagttcaaagtggtggaaacagatcctagcccttattgcattgttgctccagacacagtgatccactgcgaaggggagcctatcaaacgagaggatgaggaagagtccttgaatgaagtagggtatgatgacattggtggctgcaggaagcagctagctcagataaaggagatggtggaactgcccctgagacatcctgccctctttaaggcaattggtgtgaagcctcctagaggaatcctgctttacggacctcctggaacaggaaagaccctgattgctcgagctgtagcaaatgagactggagccttcttcttcttgatcaatggtcctgagatcatgagcaaattggctggtgagtctgagagcaaccttcgtaaagcctttgaggaggctgagaagaatgctcctgccatcatcttcattgatgagctagatgccatcgctcccaaaagagagaaagtaggagcttacctgaggggatagaggggggttgaaaggccctgacttcacttctgaccagacatcctgttctggcagactcatggcgaggtggagcggcgcattgtatcacagttgttgaccctcatggatggcctaaagcagagggcacatgtgattgttatggcagcaaccaacagacccaacagcattgacccagctctacggcgatttggtcgctttgacagggaggtagatattggaattcctgatgctacaggacgcttagagattcttcagatccataccaagaacatgaagctggcagatgatgtggacctggaacaggtagccaatgagactcacgggcatgtgggtgctgacttagcagccctgtgctcagaggctgctctgcaagccatccgcaagaagatggatctcattgacctagaggatgagaccattgatgccgaggtcatgaactctctagcagttactatggatgacttccggtgggccttgagccagagtaacccatcagcactgcgggaaaccgtggtagaggtgccacaggtaacctgggaagacatcgggggcctagaggatgtcaaacgtgagctacaggagctggtccagtatcctgtggagcacccagacaaattcctgaagtttggcatgacaccttccaagggagttctgttctatggacctcctggctgtgggaaaactttgttggccaaagccattgctaatgaatgccaggccaacttcatctccatcaagggtcctgagctgctcaccatgtggtttggggagtctgaggccaatgtcagagaaatctttgacaaggcccgccaagctgccccctgtgtgctattctttgatgagctggattcgattgccaaggctcgtggaggtaacattggagatggtggtggggctgctgaccgagtcatcaaccagatcctgacagaaatggatggcatgtccacaaaaaaaaatgtgttcatcattggcgctaccaaccggcctgacatcattgatcctgccatcctcagacctggccgtcttgatcagctcatctacatcccacttcctgatgagaagtcccgtgttgccatcctcaaggctaacctgcgcaagtccccagttgccaaggatgtggacttggagttcctggctaaaatgactaatggcttctctggagctgacctgacagagatttgccagcgtgcttgcaagctggccatccgtgaatccatcgagagtgagattaggcgagaacgagagaggcagacaaacccatcagccatggaggtagaagaggatgatccagtgcctgagatccgtcgagatcactttgaagaagccatgcgctttgcgcgccgttctgtcagtgacaatgacattcggaagtatgagatgtttgcccagacccttcagcagagtcggggctttggcagcttcagattcccttcagggaaccagggtggagctggccccagtcagggcagtggaggcggcacaggtggcagtgtatacacagaagacaatgatgatgacctgtatggctaagtggtggtggccagcgtgcagtgagctggcctgcctggaccttgttccctgggggtgggggcgcttgcccaggagagggaccaggggtgcgcccacagcctgctccattctccagtctgaacagttcagctacagtctgactctggacagggggtttctgttgcaaaaatacaaaacaaaagcgataaaataaaagcgattttcatttggtaggcggagagtgaattaccaacagggaattgggcct

SEQ ID NO: 115 - DNA, 1159 bp, Homo sapiens
  source 1..1159: mol_type = genomic DNA
gagtagctgggactataggcatgcgtcaccacatctggctaattttttattttttgtagagacaaagtctcagtatgttgcccatgctggtttcggatttctggcctcaagtgatcctcccaccttggcctcccaaagtgctgggaatacaggtgtgagccaccacgtttgcctagagacatctagttttgttagtgcttgaatcaatccattcctcctacaggcccgccaagctgccccctgtgtgctattctttgatgagctggattcgattgccaaggctcgtggaggtaacattggagatggtggtggggctgctgaccgagtcatcaaccagatcctgacagaaatggatggcatgtccacaaaaaaaaatgtgttcatcattggcgctaccaaccggcctgacatcattgatcctgccatcctcagacctggccgtcttgatcagctcatctacatcccacttcctgatgagaagtcccgtgttgccatcctcaaggctaacctgcgcaagtccccagttgccaaggatgtggacttggagttcctggctaaaatgactaatggcttctctggagctgacctgacagagatttgccagcgtgcttgcaagctggccatccgtgaatccatcgagagtgagattaggcgagaacgagagaggcagacaaacccatcagccatggaggtagaagaggatgatccagtgcctgagatccgtcgagatcactttgaagaagccatgcgctttgcgcgccgttctgtcagtgacaatgacattcggaagtatgagatgtttgcccagacccttcagcagagtcggggctttggcagcttcagattcccttcagggaaccagggtggagctggccccagtcagggcagtggaggcggcacaggtggcagtgtatacacagaagacaatgatgatgacctgtatggctaagtggtggtggccagcgtgcagtgagctggcctgcctggaccttgttccctgggggtgggggcgcttgcccaggagagggaccaggggtgcgcccacagcctgctccattctccagtctgaacagttcagctacagtctgactctggacagggggtttctgttgcaaaaatacaaaacaaaagcgataaaataaaagcgattttcatttgg

SEQ ID NO: 116 - DNA, 508 bp, Homo sapiens
  source 1..508: mol_type = genomic DNA
cacagttgagacttaaaatttctactatctcaaaaagtttccttagccacttcagtcaacatctcccctccttaagccccatcactgatgtgatttctgtccctacagttttcccttttccagagtgcattgacaagtttttaagcagagcagtgactcaattttaggaagcatggcctagcatcttacctcaggttggattggaagggcaaggagaccaataaactgcagtaatgggaggcctgggatgaaatccaggctgggctttaactagccctagtgatctgtgtttaccaactataggaggtagaagaggatgatccagtgcctgagatccgtcgagatcactttgaagaagccatgcgctttgcgcgccgttctgtcagtgacaatgacattcggaagtatgagatgtttgcccagacccttcagcagagtcggggctttggcagcttcagattcccttcagggaaccagggtggagctggccccagtcagggcagtggag

SEQ ID NO: 117 - DNA, 2162 bp, Homo sapiens
  source 1..2162: mol_type = genomic DNA
agtctcagcgaagcgtctgcgaccgtcgtttgagtcgtcgctgccgctgccgctgccactgccactgccacctcgcggatcaggagccagcgttgttcgcccgacgcctcgctgccggtgggaggaagcgagagggaagccgcttgcgggtttgtcgccgctgctcgcccaccgcctggaagagccgagccccggcccagtcggtcgcttgccaccgctcgtagccgttacccgcgggccgccacagccgccggccgggagaggcgcgcgccatggcttctggagccgattcaaaaggtgatgacctatcaacagccattctcaaacagaagaaccgtcccaatcggttaattgttgatgaagccatcaatgaggacaacagtgtggtgtccttgtcccagcccaagatggatgaattgcagttgttccgaggtgacacagtgttgctgaaaggaaagaagagacgagaagctgtttgcatcgtcctttctgatgatacttgttctgatgagaagattcggatgaatagagttgttcggaataaccttcgtgtacgcctaggggatgtcatcagcatccagccatgccctgatgtgaagtacggcaaacgtatccatgtgctgcccattgatgacacagtggaaggcattactggtaatctcttcgaggtataccttaagccgtacttcctggaagcgtatcgacccatccggaaaggagacatttttcttgtccgtggtgggatgcgtgctgtggagttcaaagtggtggaaacagatcctagcccttattgcattgttgctccagacacagtgatccactgcgaaggggagcctatcaaacgagaggatgaggaagagtccttgaatgaagtagggtatgatgacattggtggctgcaggaagcagctagctcagataaaggagatggtggaactgcccctgagacatcctgccctctttaaggcaattggtgtgaagcctcctagaggaatcctgctttacggacctcctggaacaggaaagaccctgattgctcgagctgtagcaaatgagactggagccttcttcttcttgatcaatgactcatggcgaggtggagcggcgcattgtatcacagttgttgaccctcatggatggcctaaagcagagggcacatgtgattgttatggcagcaaccaacagacccaacagcattgacccagctctacggcgatttggtcgctttgacagggaggtagatattggaattcctgatgctacaggacgcttagagattcttcagatccataccaagaacatgaagctggcagatgatgtggacctggaacaggtagccaatgagactcacgggcatgtgggtgctgacttagcagccctgtgctcagaggctgctctgcaagccatccgcaagaagatggatctcattgacctagaggatgagaccattgatgccgaggtcatgaactctctagcagttactatggatgacttccggtgggccttgagccagagtaacccatcagcactgcgggaaaccgtggtagaggtgccacaggtaacctgggaagacatcgggggcctagaggatgtcaaacgtgagctacaggagctggtccaggtagggcaacttggtccagggtgagtcactgtctcagtacattgtaattgatctgggtgatctcagggtgtcaacacatttgctgcaagagttgtgagagcacgacttaggaacctactgttcttaggtttgaggcactaaggagtcttcttctagagaacctggatctgataccattgggtacaccatgaaataatggaggggatgcttctgtttagttaggtttctttcaaaatgtggaggtagccttgaaccctctttccttttcctcctagtatcctgtggagcacccagacaaattcctgaagtttggcatgacaccttccaagggagttctgttctatggacctcctggctgtgggaaaactttgttggccaaagccattgctaatgaatgccaggccaacttcatctccatcaagggtcctgagctgctcaccatgtggtttggggagtctgaggccaatgtcagagaaatctttgacaaggcccgccaagctgccccctgtgtgctattctttgatgagctggattcgattgcc

SEQ ID NO: 118 - DNA, 441 bp, Homo sapiens
  source 1..441: mol_type = genomic DNA
gtcctgagatcatgagcaaattggctgactcatggcgaggtggagcggcgcattgtatcacagttgttgaccctcatggatggcctaaagcagagggcacatgtgattgttatggcagcaaccaacagacccaacagcattgacccagctctacggcgatttggtcgctttgacagggaggtagatattggaattcctgatgctacaggacgcttagagattcttcagatccataccaagaacatgaagctggcagatgatgtggacctggaacaggtagccaatgagactcacgggcatgtgggtgctgacttagcagccctgtgctcagaggctgctctgcaagccatccgcaagaagatggatctcattgacctagaggatgagaccattgatgccgaggtcatgaactctctagcagttactatggatgacttccgg

SEQ ID NO: 119 - DNA, 709 bp, Homo sapiens
  source 1..709: mol_type = genomic DNA
ttgcattgttgctccagacacagtgatccactgcgaaggggagcctatcaaacgagagcctcctagaggaatcctgctttacggacctcctggaacaggaaagaccctgattgctcgagctgtagcaaatgagactggagccttcttcttcttgatcaatggtcctgagatcatgagcaaattggctggtgagtctgagagcaaccttcgtaaagcctttgaggaggctgagaagaatgctcctgccatcatcttcattgatgagctagatgccatcgctcccaaaagagagaaaactcatggcgaggtggagcggcgcattgtatcacagttgttgaccctcatggatggcctaaagcagagggcacatgtgattgttatggcagcaaccaacagacccaacagcattgacccagctctacggcgatttggtcgctttgacagggaggtagatattggaattcctgatgctacaggacgcttagagattcttcagatccataccaagaacatgaagctggcagatgatgtggacctggaacaggtagccaatgagactcacgggcatgtgggtgctgacttagcagccctgtgctcagaggctgctctgcaagccatccgcaagaagatggatctcattgacctagaggatgagaccattgatgccgaggtcatgaactctctagcagttactatggatgacttccgg

SEQ ID NO: 120 - DNA, 463 bp, Homo sapiens
  source 1..463: mol_type = genomic DNA
gagacatttttcttgtccgtggtgggatgcgtgctgtggagttcaaagtggtggaaacagatcctagcccttattgcattgttgctccagacacagtgatccactgcgaaggggagcctatcaaacgagaggaactcctggactcaagcattcctcccacctctgcctcccaaagtgctgggattacagatgtgagccaccatgccgggttgagaatcttcttatacggatgaggaagagtccttgaatgaagtagggtatgatgacattggtggctgcaggaagcagctagctcagataaaggagatggtggaactgcccctgagacatcctgccctctttaaggcaattggtgtgaagcctcctagaggaatcctgctttacggacctcctggaacaggaaagaccctgattgctcgagctgtagcaaatgagactggagccttcttcttcttgatcaatg

SEQ ID NO: 121 - DNA, 364 bp, Homo sapiens
  source 1..364: mol_type = genomic DNA
gagacatttttcttgtccgtggtgggatgcgtgctgtggagttcaaagtggtggaaacagatcctagcccttattgcattgttgctccagacacagtgatccactgcgaaggggagcctatcaaacgagaggtgagaagagtccttgaatgaagtagggtatgatgacattggtggctgcaggaagcagctagctcagataaaggagatggtggaactgcccctgagacatcctgccctctttaaggcaattggtgtgaagcctcctagaggaatcctgctttacggacctcctggaacaggaaagaccctgattgctcgagctgtagcaaatgagactggagccttcttcttcttgatcaatg

SEQ ID NO: 122 - DNA, 436 bp, Homo sapiens
  source 1..436: mol_type = genomic DNA
cccaagatggatgaattgcagttgttccgaggtgacacagtgttgctgaaaggaaagaagagacgagaagctgtttgcatcgtcctttctgatgatacttgttctgatgagaagattcggatgaatagagttgttcggaataaccttcgtgtacgcctaggggatgtcatcaggagacatttttcttgtccgtggtgggatgcgtgctgtggagttcaaagtggtggaaacagatcctagcccttattgcattgttgctccagacacagtgatccactgcgaaggggagcctatcaaacgagaggatgaggaagagtccttgaatgaagtagggtatgatgacattggtggctgcaggaagcagctagctcagataaaggagatggtggaactgcccctgagacatcctgccctctttaaggcaattggtgtgaag

SEQ ID NO: 123 - DNA, 328 bp, Homo sapiens
  source 1..328: mol_type = genomic DNA
catccagccatgccctgatgtgaagtacggcaaacgtatccatgtgctgcccattgatgacacagtggaaggcattactggtaatctcttcgaggtataccttaagccgtacttcctggaagcgtatcgacccatccggaaagtagagacggggtttcaccatgttggtcaggctcgtctcgaactcttgacctcaggagacatttttcttgtccgtggtgggatgcgtgctgtggagttcaaagtggtggaaacagatcctagcccttattgcattgttgctccagacacagtgatccactgcgaaggggagcctatcaaacgagag

SEQ ID NO: 124 - DNA, 809 bp, Homo sapiens
  source 1..809: mol_type = genomic DNA
agtctcagcgaagcgtctgcgaccgtcgtttgagtcgtcgctgccgctgccgctgccactgccactgccacctcgcggatcaggagccagcgttgttcgcccgacgcctcgctgccggtgggaggaagcgagagggaagccgcttgcgggtttgtcgccgctgctcgcccaccgcctggaagagccgagccccggcccagtcggtcgcttgccaccgctcgtagccgttacccgcgggccgccacagccgccggccgggagaggcgcgcgccatggcttctggagccgagccattattttctgaccctggggcaggatcactcacttggggccttatagctgggacactgacgctcaaaataccaggagctgctggaatggttcaaaaggtgatgacctatcaacagccattctcaaacagaagaaccgtcccaatcggttaattgttgatgaagccatcaatgaggacaacagtgtggtgtccttgtcccagcccaagatggatgaattgcagttgttccgaggtgacacagtgttgctgaaaggaaagaagagacgagaagctgtttgcatcgtcctttctgatgatacttgttctgatgagaagattcggatgaatagagttgttcggaataaccttcgtgtacgcctaggggatgtcatcagcatccagccatgccctgatgtgaagtacggcaaacgtatccatgtgctgcccattgatgacacagtggaaggcattactggtaatctcttcgaggtataccttaagccgtacttcctggaagcgtatcgacccatccggaaag

SEQ ID NO: 125 - DNA, 321 bp, Homo sapiens
  source 1..321: mol_type = genomic DNA
ttcaaaaggtgatgacctatcaacagccattctcaaacagaagaaccgtcccaatcggttaattgttgatgaagccatcaatgaggacaacagtgtggtgtccttgtcccagcccaatgacccaaaggccttaactttctttcctcagcccaagatggatgaattgcagttgttccgaggtgacacagtgttgctgaaaggaaagaagagacgagaagctgtttgcatcgtcctttctgatgatacttgttctgatgagaagattcggatgaatagagttgttcggaataaccttcgtgtacgcctaggggatgtcatcag

SEQ ID NO: 126 - DNA, 306 bp, Homo sapiens
  source 1..306: mol_type = genomic DNA
ttcaaaaggtgatgacctatcaacagccattctcaaacagaagaaccgtcccaatcggttaattgttgatgaagccatcaatgaggacaacagtgtggtgtccttgtcccaggccttaactttctttcctcagcccaagatggatgaattgcagttgttccgaggtgacacagtgttgctgaaaggaaagaagagacgagaagctgtttgcatcgtcctttctgatgatacttgttctgatgagaagattcggatgaatagagttgttcggaataaccttcgtgtacgcctaggggatgtcatcag

SEQ ID NO: 127 - DNA, 462 bp, Homo sapiens
  source 1..462: mol_type = genomic DNA
agtctcagcgaagcgtctgcgaccgtcgtttgagtcgtcgctgccgctgccgctgccactgccactgccacctcgcggatcaggagccagcgttgttcgcccgacgcctcgctgccggtgggaggaagcgagagggaagccgcttgcgggtttgtcgccgctgctcgcccaccgcctggaagagccgagccccggcccagtcggtcgcttgccaccgctcgtagccgttacccgcgggccgccacagccgccggccgggagaggcgcgcgccatggcttctggagccgacccaagatggatgaattgcagttgttccgaggtgacacagtgttgctgaaaggaaagaagagacgagaagctgtttgcatcgtcctttctgatgatacttgttctgatgagaagattcggatgaatagagttgttcggaataaccttcgtgtacgcctaggggatgtcatcag

SEQ ID NO: 128 - DNA, 458 bp, Homo sapiens
  source 1..458: mol_type = genomic DNA
ctgccacctcgcggatcaggagccagcgttgttcgcccgacgcctcgctgccggtgggaggaagcgagagggaagccgcttgcgggtttgtcgccgctgctcgcccaccgcctggaagagccgagccccggcccagtcggtcgcttgccaccgctcgtagccgttacccgcgggccgccacagccgccggccgggagaggcgcgcgccatggcttctggagccgaaggaggacatcaaagttcagaggttaggtaacttgcccaagatcacaattaagcagtggcataattggaattcagacccaatgggtctgactatagagttcctgctcttaaccactcttctttcaaaaggtgatgacctatcaacagccattctcaaacagaagaaccgtcccaatcggttaattgttgatgaagccatcaatgaggacaacagtgtggtgtccttgtcccag

SEQ ID NO: 129 - DNA, 271 bp, Homo sapiens
  source 1..271: mol_type = genomic DNA
ttctcggctcagtctcagcgaagcgtctgcgaccgtcgtttgagtcgtcgctgccgctgccgctgccactgccactgccacctcgcggatcaggagccagcgttgttcgcccgacgcctcgctgccggtgggaggaagcgagagggaagccgcttgcggttcaaaaggtgatgacctatcaacagccattctcaaacagaagaaccgtcccaatcggttaattgttgatgaagccatcaatgaggacaacagtgtggtgtccttgtcccag

SEQ ID NO: 130 - DNA, 415 bp, Homo sapiens
  source 1..415: mol_type = genomic DNA
ttctcggctcagtctcagcgaagcgtctgcgaccgtcgtttgagtcgtcgctgccgctgccgctgccactgccactgccacctcgcggatcaggagccagcgttgttcgcccgacgcctcgctgccggtgggaggaagcgagagggaagccgcttgcgggtttgtcgccgctgctcgcccaccgcctggaagagccgagccccggcccagtcggtcgcttgccaccgctcgtagccgttacccgcgggccgccacagccgccggccgggagaggcgcgcgccatggcttctggagccgagtgattcaaaaggtgatgacctatcaacagccattctcaaacagaagaaccgtcccaatcggttaattgttgatgaagccatcaatgaggacaacagtgtggtgtccttgtcccag

SEQ ID NO: 131 - DNA, 510 bp, Homo sapiens
  source 1..510: mol_type = genomic DNA
ttctcggctcagtctcagcgaagcgtctgcgaccgtcgtttgagtcgtcgctgccgctgccgctgccactgccactgccacctcgcggatcaggagccagcgttgttcgcccgacgcctcgctgccggtgggaggaagcgagagggaagccgcttgcgggtttgtcgccgctgctcgcccaccgcctggaagagccgagccccggcccagtcggtcgcttgccaccgctcgtagccgttacccgcgggccgccacagccgccggccgggagaggcgcgcgccatggcttctggagccgagtgagtgtgcgcgcgccgttcgcttgctgcggcggcgcgcaccgggaccagccgcgcagggtaggcccggcggggcctggccgtgggcgcgtcagagagttcaaaaggtgatgacctatcaacagccattctcaaacagaagaaccgtcccaatcggttaattgttgatgaagccatcaatgaggacaacagtgtggtgtccttgtcccag

SEQ ID NO: 132 - DNA, 3922 bp, Homo sapiens
  source 1..3922: mol_type = genomic DNA
acagaagaaatagcaagtgccgagaagctggcatcagaaaaacagaggggagatttgtgtggctgcagccgagggagaccaggaagatctgcatggtgggaaggacctgatgatacagaggaattacaacacatatacttagtgtttcaatgaacaccaagataaataagtgaagagctagtccgctgtgagtctcctcagtgacacagggctggatcaccatcgacggcactttctgagtactcagtgcagcaaagaaagactacagacatctcaatggcaggggtgagaaataagaaaggctgctgactttaccatctgaggccacacatctgctgaaatggagataattaacatcactagaaacagcaagatgacaatataatgtctaagtagtgacatgtttttgcacatttccagcccctttaaatatccacacacacaggaagcacaaaaggaagcacagagatccctgggagaaatgcccggccgccatcttgggtcatcgatgagcctcgccctgtgcctggtcccgcttgtgagggaaggacattagaaaatgaattgatgtgttccttaaaggatgggcaggaaaacagatcctgttgtggatatttatttgaacgggattacagatttgaaatgaagtcacaaagtgagcattaccaatgagaggaaaacagacgagaaaatcttgatggcttcacaagacatgcaacaaacaaaatggaatactgtgatgacatgaggcagccaagctggggaggagataaccacggggcagagggtcaggattctggccctgctgcctaaactgtgcgttcataaccaaatcatttcatatttctaaccctcaaaacaaagctgttgtaatatctgatctctacggttccttctgggcccaacattctccatatatccagccacactcatttttaatatttagttcccagatctgtactgtgacctttctacactgtagaataacattactcattttgttcaaagacccttcgtgttgctgcctaatatgtagctgactgtttttcctaaggagtgttctggcccaggggatctgtgaacaggctgggaagcatctcaagatctttccagggttatacttactagcacacagcatgatcattacggagtgaattatctaatcaacatcatcctcagtgtctttgcccatactgaaattcatttcccacttttgtgcccattctcaagacctcaaaatgtcattccattaatatcacaggattaacttttttttttaacctggaagaattcaatgttacatgcagctatgggaatttaattacatattttgttttccagtgcaaagatgactaagtcctttatccctcccctttgtttgattttttttccagtataaagttaaaatgcttagccttgtactgaggctgtatacagccacagcctctccccatccctccagccttatctgtcatcaccatcaacccctcccatgcacctaaacaaaatctaacttgtaattccttgaacatgtcaggcatacattattccttctgcctgagaagctcttccttgtctcttaaatctagaatgatgtaaagttttgaataagttgactatcttacttcatgcaaagaagggacacatatgagattcatcatcacatgagacagcaaatactaaaagtgtaatttgattataagagtttagataaatatatgaaatgcaagagccacagagggaatgtttatggggcacgtttgtaagcctgggatgtgaagcaaaggcagggaacctcatagtatcttatataatatacttcatttctctatctctatcacaatatccaacaagcttttcacagaattcatgcagtgcaaatccccaaaggtaacctttatccatttcatggtgagtgcgctttagaattttggcaaatcatactggtcacttatctcaactttgagatgtgtttgtccttgtagttaattgaaagaaatagggcactcttgtgagccactttagggttcactcctggcaataaagaatttacaaagagctactcaggaccagttgttaagagctctgtgtgtgtgtgtgtgtgtgtgagtgtacatgccaaagtgtgcctctctctctttgacccattatttcagacttaaaaacaagcatgttttcaaatggcactatgagctgccaatgatgtatcaccaccatatctcattattctccagtaaatgtgataataatgtcatctgttaacataaaaaaagtttgacttcacaaaagcagctggaaatggacaaccacaatatgcataaatctaactcctaccatcagctacacactgcttgacatatattgttagaagcacctcgcatttgtgggttctcttaagcaaaatacttgcattaggtctcagctggggctgtgcatcaggcggtttgagaaatattcaattctcagcagaagccagaatttgaattccctcatcttttaggaatcatttaccaggtttggagaggattcagacagctcaggtgctttcactaatgtctctgaacttctgtccctctttgtgttcatggatagtccaataaataatgttatctttgaactgatgctcataggagagaatataagaactctgagtgatatcaacattagggattcaaagaaatattagatttaagctcacactggtcaaaaggaaccaagatacaaagaactctgagctgtcatcgtccccatctctgtgagccacaaccaacagcaggacccaacgcatgtctgagatccttaaatcaaggaaaccagtgtcatgagttgaattctcctattatggatgctagcttctggccatctctggctctcctcttgacacatattagcttctagcctttgcttccacgacttttatcttttctccaacacatcgcttaccaatcctctctctgctctgttgctttggacttccccacaagaatttcaacgactctcaagtcttttcttccatccccaccactaacctgaatgcctagacccttatttttattaatttccaatagatgctgcctatgggctatattgctttagatgaacattagatatttaaagctcaagaggttcaaaatccaactcattatcttctctttctttcacctccctgctcctctccctatattactgattgcactgaacagcatggtccccaatgtagccatgcaaatgagaaacccagtggctccttgtggtacatgcatgcaagactgctgaagccagaaggatgactgattacgcctcatgggtggaggggaccactcctgggccttcgtgattgtcaggagcaagacctgagatgctccctgccttcagtgtcctctgcatctcccctttctaatgaagatccatagaatttgctacatttgagaattccaattaggaactcacatgttttatctgccctatcaattttttaaacttgctgaaaattaagttttttcaaaatctgtccttgtaaattactttttcttacagtgtcttggcatactatatcaactttgattctttgttacaacttttcttactcttttatcaccaaagtggcttttattctctttattattattattttcttttactactatattacgttgttattattttgttctctatagtatcaatttatttgatttagtttcaatttatttttattgctgacttttaaaataagtgattcggggggtgggagaacaggggagggagagcattaggacaaatacctaatgcatgtgggacttaaaacctagatgatgggttgataggtgcagcaaaccactatggcacacgtatacctgtgtaacaaacctacacattctgcacatgtatcccagaacgtaaagtaaaatttaaaaaaaagtga

SEQ ID NO: 133 - DNA, 2825 bp, Homo sapiens
  source 1..2825: mol_type = genomic DNA
agtcaacgtttgatggagacaaaatgttggagcctgctcctaccggcaaataaacggactcagggtcttcacgaatatgcagcacagccagctgggatccaggcagtctgtttttggtctcagcctggtttccctcacttcttcgatcaggaagtgcagaaagcactatctctgctgctctgcatcccagagattcatcctctggagacccagcttcctctattgtttcagcactctgggcaggttctgtgagataagacaaatcaaagggaggtgtgtacggtgccagcgactgcttcagagaatcttcctccaaaggagggtcaccaccatacaggaagtgttcaggctctctcagtaaatcttcatcgatattctggcccattacatcatattcaaaatcaccccacgaggcttcagatgagcagatatcttgcttccctaggtccccatcaactggcgtttccggatggccttcggataatgtcagtttactcatgtcatctattgttcccgtggatgtgttgagacctgaggcatcgctgaaactgtggtcaaaggcagcttcgcttatatccagacaagtgtctgaggctagcaaagcatcaggaaccaaggcaggattctctgtggataaatgtggatcaccatcaaacaaagctcttgcaccaggctgactttcaggagaaaagctgtctgatatccaagaaccgtcaccttctggagttggctcttgttctggaagacggaaagtccaagatcaagatcctgacatactcgctgtctgatgagcacctgcctcctgattcataggctgccatctttttgctgtgtcctcacgtgacagaaaaggtgagaaataagaaaggctgctgactttaccatctgaggccacacatctgctgaaatggagataattaacatcactagaaacagcaagatgacaatataatgtctaagtagtgacatgtttttgcacatttccagcccctttaaatatccacacacacaggaagcacaaaaggaagcacagaggtaagtgctttataaagcactcaatttctactcagaaatttttgatggccttaagttcctctactcgtttctatccttcctactcactgtcctcccggaatccactaccgattttctatttcttgcctcgtattgtctgactggctcacttggatttatcctcacggagtctggattttctacccgggctcacctccgtccctccatatttgtcctccactttcacagatccctgggagaaatgcccggccgccatcttgggtcatcgatgagcctcgccctgtgcctggtcccgcttgtgagggaaggacattagaaaatgaattgatgtgttccttaaaggatgggcaggaaaacagatcctgttgtggatatttatttgaacgggattacagatttgaaatgaagtcacaaagtgagcattaccaatgagaggaaaacagacgagaaaatcttgatggcttcacaagacatgcaacaaacaaaatggaatactgtgatgacatgaggcagccaagctggggaggagataaccacggggcagagggtcaggattctggccctgctgcctaaactgtgcgttcataaccaaatcatttcatatttctaaccctcaaaacaaagctgttgtaatatctgatctctacggttccttctgggcccaacattctccatatatccagccacactcatttttaatatttagttcccagatctgtactgtgacctttctacactgtagaataacattactcattttgttcaaagacccttcgtgttgctgcctaatatgtagctgactgtttttcctaaggagtgttctggcccaggggatctgtgaacaggctgggaagcatctcaagatctttccagggttatacttactagcacacagcatgatcattacggagtgaattatctaatcaacatcatcctcagtgtctttgcccatactgaaattcatttcccacttttgtgcccattctcaagacctcaaaatgtcattccattaatatcacaggattaacttttttttttaacctggaagaattcaatgttacatgcagctatgggaatttaattacatattttgttttccagtgcaaagatgactaagtcctttatccctcccctttgtttgattttttttccagtataaagttaaaatgcttagccttgtactgaggctgtatacagccacagcctctccccatccctccagccttatctgtcatcaccatcaacccctcccatgcacctaaacaaaatctaacttgtaattccttgaacatgtcaggcatacattattccttctgcctgagaagctcttccttgtctcttaaatctagaatgatgtaaagttttgaataagttgactatcttacttcatgcaaagaagggacacatatgagattcatcatcacatgagacagcaaatactaaaagtgtaatttgattataagagtttagataaatatatgaaatgcaagagccacagagggaatgtttatggggcacgtttgtaagcctgggatgtgaagcaaaggcagggaacctcatagtatcttatataatatacttcatttctctatctctatcacaatatccaacaagcttttcacagaattcatgcagtgcaaatccccaaaggtaacctttatccatttcatggtgagtgcgctttagaattttggcaaatcatactggtcacttatctcaactttgagatgtgtttgtccttgtagttaattgaaagaaatagggcactcttgtgagccactttagggttc

SEQ ID NO: 134 - DNA, 3735 bp, Homo sapiens
  source 1..3735: mol_type = genomic DNA
agaagaaatagcaagtgccgagaagctggcatcagaaaaacagaggggagatttgtgtggctgcagccgagggagaccaggaagatctgcatggtgggaaggacctgatgatacagaggtgagaaataagaaaggctgctgactttaccatctgaggccacacatctgctgaaatggagataattaacatcactagaaacagcaagatgacaatataatgtctaagtagtgacatgtttttgcacatttccagcccctttaaatatccacacacacaggaagcacaaaaggaagcacagagatccctgggagaaatgcccggccgccatcttgggtcatcgatgagcctcgccctgtgcctggtcccgcttgtgagggaaggacattagaaaatgaattgatgtgttccttaaaggatgggcaggaaaacagatcctgttgtggatatttatttgaacgggattacagatttgaaatgaagtcacaaagtgagcattaccaatgagaggaaaacagacgagaaaatcttgatggcttcacaagacatgcaacaaacaaaatggaatactgtgatgacatgaggcagccaagctggggaggagataaccacggggcagagggtcaggattctggccctgctgcctaaactgtgcgttcataaccaaatcatttcatatttctaaccctcaaaacaaagctgttgtaatatctgatctctacggttccttctgggcccaacattctccatatatccagccacactcatttttaatatttagttcccagatctgtactgtgacctttctacactgtagaataacattactcattttgttcaaagacccttcgtgttgctgcctaatatgtagctgactgtttttcctaaggagtgttctggcccaggggatctgtgaacaggctgggaagcatctcaagatctttccagggttatacttactagcacacagcatgatcattacggagtgaattatctaatcaacatcatcctcagtgtctttgcccatactgaaattcatttcccacttttgtgcccattctcaagacctcaaaatgtcattccattaatatcacaggattaacttttttttttaacctggaagaattcaatgttacatgcagctatgggaatttaattacatattttgttttccagtgcaaagatgactaagtcctttatccctcccctttgtttgattttttttccagtataaagttaaaatgcttagccttgtactgaggctgtatacagccacagcctctccccatccctccagccttatctgtcatcaccatcaacccctcccatgcacctaaacaaaatctaacttgtaattccttgaacatgtcaggcatacattattccttctgcctgagaagctcttccttgtctcttaaatctagaatgatgtaaagttttgaataagttgactatcttacttcatgcaaagaagggacacatatgagattcatcatcacatgagacagcaaatactaaaagtgtaatttgattataagagtttagataaatatatgaaatgcaagagccacagagggaatgtttatggggcacgtttgtaagcctgggatgtgaagcaaaggcagggaacctcatagtatcttatataatatacttcatttctctatctctatcacaatatccaacaagcttttcacagaattcatgcagtgcaaatccccaaaggtaacctttatccatttcatggtgagtgcgctttagaattttggcaaatcatactggtcacttatctcaactttgagatgtgtttgtccttgtagttaattgaaagaaatagggcactcttgtgagccactttagggttcactcctggcaataaagaatttacaaagagctactcaggaccagttgttaagagctctgtgtgtgtgtgtgtgtgtgtgagtgtacatgccaaagtgtgcctctctctctttgacccattatttcagacttaaaaacaagcatgttttcaaatggcactatgagctgccaatgatgtatcaccaccatatctcattattctccagtaaatgtgataataatgtcatctgttaacataaaaaaagtttgacttcacaaaagcagctggaaatggacaaccacaatatgcataaatctaactcctaccatcagctacacactgcttgacatatattgttagaagcacctcgcatttgtgggttctcttaagcaaaatacttgcattaggtctcagctggggctgtgcatcaggcggtttgagaaatattcaattctcagcagaagccagaatttgaattccctcatcttttaggaatcatttaccaggtttggagaggattcagacagctcaggtgctttcactaatgtctctgaacttctgtccctctttgtgttcatggatagtccaataaataatgttatctttgaactgatgctcataggagagaatataagaactctgagtgatatcaacattagggattcaaagaaatattagatttaagctcacactggtcaaaaggaaccaagatacaaagaactctgagctgtcatcgtccccatctctgtgagccacaaccaacagcaggacccaacgcatgtctgagatccttaaatcaaggaaaccagtgtcatgagttgaattctcctattatggatgctagcttctggccatctctggctctcctcttgacacatattagcttctagcctttgcttccacgacttttatcttttctccaacacatcgcttaccaatcctctctctgctctgttgctttggacttccccacaagaatttcaacgactctcaagtcttttcttccatccccaccactaacctgaatgcctagacccttatttttattaatttccaatagatgctgcctatgggctatattgctttagatgaacattagatatttaaagctcaagaggttcaaaatccaactcattatcttctctttctttcacctccctgctcctctccctatattactgattgcactgaacagcatggtccccaatgtagccatgcaaatgagaaacccagtggctccttgtggtacatgcatgcaagactgctgaagccagaaggatgactgattacgcctcatgggtggaggggaccactcctgggccttcgtgattgtcaggagcaagacctgagatgctccctgccttcagtgtcctctgcatctcccctttctaatgaagatccatagaatttgctacatttgagaattccaattaggaactcacatgttttatctgccctatcaattttttaaacttgctgaaaattaagttttttcaaaatctgtccttgtaaattactttttcttacagtgtcttggcatactatatcaactttgattctttgttacaacttttcttactcttttatcaccaaagtggcttttattctctttattattattattttcttttactactatattacgttgttattattttgttctctatagtatcaatttatttgatttagtttcaatttatttttattgctgacttttaaaataagtgattcggggggtgggagaacaggggagggagagcattaggacaaatacctaatgcatgtgggacttaaaacctagatgatgggttgataggtgcagcaaaccactatggcacacgtatacctgtgtaacaaacctacacattctgcacatgtatcccagaacgtaaag

SEQ ID NO: 135 - DNA, 2498 bp, Homo sapiens
  source 1..2498: mol_type = genomic DNA
gggcaggttctgtgagataagacaaatcaaagggaggtgtgtacggtgccagcgactgcttcagagaatcttcctccaaaggagggtcaccaccatacaggaagtgttcaggctctctcagtaaatcttcatcgatattctggcccattacatcatattcaaaatcaccccacgaggcttcagatgagcagatatcttgcttccctaggtccccatcaactggcgtttccggatggccttcggataatgtcagtttactcatgtcatctattgttcccgtggatgtgttgagacctgaggcatcgctgaaactgtggtcaaaggcagcttcgcttatatccagacaagtgtctgaggctagcaaagcatcaggaaccaaggcaggattctctgtggataaatgtggatcaccatcaaacaaagctcttgcaccaggctgactttcaggagaaaagctgtctgatatccaagaaccgtcaccttctggagttggctcttgttctggaagacggaaagtccaagatcaagatcctgacatactcgctgtctgatgagcacctgcctcctgattcataggctgccatctttttgctgtgtcctcacgtgacagaaaaggtctgcaggctcactgacactctctgaagatggcgggttcctaaaaagtcatgagagttgagggatgcatttcagtgtatgctcagagacatcatggctttcatcatcttccttcttcttctgagtaaccaactctaggtgagaaataagaaaggctgctgactttaccatctgaggccacacatctgctgaaatggagataattaacatcactagaaacagcaagatgacaatataatgtctaagtagtgacatgtttttgcacatttccagcccctttaaatatccacacacacaggaagcacaaaaggaagcacagagatccctgggagaaatgcccggccgccatcttgggtcatcgatgagcctcgccctgtgcctggtcccgcttgtgagggaaggacattagaaaatgaattgatgtgttccttaaaggatgggcaggaaaacagatcctgttgtggatatttatttgaacgggattacagatttgaaatgaagtcacaaagtgagcattaccaatgagaggaaaacagacgagaaaatcttgatggcttcacaagacatgcaacaaacaaaatggaatactgtgatgacatgaggcagccaagctggggaggagataaccacggggcagagggtcaggattctggccctgctgcctaaactgtgcgttcataaccaaatcatttcatatttctaaccctcaaaacaaagctgttgtaatatctgatctctacggttccttctgggcccaacattctccatatatccagccacactcatttttaatatttagttcccagatctgtactgtgacctttctacactgtagaataacattactcattttgttcaaagacccttcgtgttgctgcctaatatgtagctgactgtttttcctaaggagtgttctggcccaggggatctgtgaacaggctgggaagcatctcaagatctttccagggttatacttactagcacacagcatgatcattacggagtgaattatctaatcaacatcatcctcagtgtctttgcccatactgaaattcatttcccacttttgtgcccattctcaagacctcaaaatgtcattccattaatatcacaggattaacttttttttttaacctggaagaattcaatgttacatgcagctatgggaatttaattacatattttgttttccagtgcaaagatgactaagtcctttatccctcccctttgtttgattttttttccagtataaagttaaaatgcttagccttgtactgaggctgtatacagccacagcctctccccatccctccagccttatctgtcatcaccatcaacccctcccatgcacctaaacaaaatctaacttgtaattccttgaacatgtcaggcatacattattccttctgcctgagaagctcttccttgtctcttaaatctagaatgatgtaaagttttgaataagttgactatcttacttcatgcaaagaagggacacatatgagattcatcatcacatgagacagcaaatactaaaagtgtaatttgattataagagtttagataaatatatgaaatgcaagagccacagagggaatgtttatggggcacgtttgtaagcctgggatgtgaagcaaaggcagggaacctcatagtatcttatataatatacttcatttctctatctctatcacaatatccaacaagcttttcacagaattcatgcagtgcaaatccccaaaggtaacctttatccatttcatggtgagtgcgctttagaattttggcaaatcatactggtcacttatctcaactttgagatgtgtttgtccttgtagttaattgaaagaaatagggcactcttgtgagccactttagggttc

SEQ ID NO: 136 - DNA, 20 bp, Homo sapiens
  source 1..20: mol_type = genomic DNA
gcaaatcaaagcaggtgaga

SEQ ID NO: 137 - DNA, 20 bp, Homo sapiens
  source 1..20: mol_type = genomic DNA
actatgcctcaccaccatca

SEQ ID NO: 138 - DNA, 25 bp, Homo sapiens
  source 1..25: mol_type = genomic DNA
aggctacacccaaaccctgtccttc

SEQ ID NO: 139 - DNA, 19 bp, Homo sapiens
  source 1..19: mol_type = genomic DNA
accttgggcctctgctaaa

SEQ ID NO: 140 - DNA, 20 bp, Homo sapiens
  source 1..20: mol_type = genomic DNA
ttcctgctgacttccacttg

SEQ ID NO: 141 - DNA, 26 bp, Homo sapiens
  source 1..26: mol_type = genomic DNA
actcaatgggtgacactcacaggaca

SEQ ID NO: 142 - DNA, 20 bp, Homo sapiens
  source 1..20: mol_type = genomic DNA
attgaccgcagagctacctt

SEQ ID NO: 143 - DNA, 20 bp, Homo sapiens
  source 1..20: mol_type = genomic DNA
gcatgaaagtggaccaacac

SEQ ID NO: 144 - DNA, 20 bp, Homo sapiens
  source 1..20: mol_type = genomic DNA
tctggatgccacacggcctc

SEQ ID NO: 145 - DNA, 19 bp, Homo sapiens
  source 1..19: mol_type = genomic DNA
caagcttaccacctgcacc

SEQ ID NO: 146 - DNA, 17 bp, Homo sapiens
  source 1..17: mol_type = genomic DNA
tgggcagctgtgaggac

SEQ ID NO: 147 - DNA, 21 bp, Homo sapiens
  source 1..21: mol_type = genomic DNA
ctgcggcggtgttctggtgca

SEQ ID NO: 148 - DNA, 20 bp, Homo sapiens
  source 1..20: mol_type = genomic DNA
aacctggcccagtcataatc

SEQ ID NO: 149 - DNA, 20 bp, Homo sapiens
  source 1..20: mol_type = genomic DNA
gctaacgatcatggcagcta

SEQ ID NO: 150 - DNA, 26 bp, Homo sapiens
  source 1..26: mol_type = genomic DNA
catcctgacagtggcaataatcacga

SEQ ID NO: 151 - DNA, 20 bp, Homo sapiens
  source 1..20: mol_type = genomic DNA
cccaaccgctggtagtttat

SEQ ID NO: 152 - DNA, 20 bp, Homo sapiens
  source 1..20: mol_type = genomic DNA
gtatggtgccgtgctatttg

SEQ ID NO: 153 - DNA, 20 bp, Homo sapiens
  source 1..20: mol_type = genomic DNA
ataccggctgccaaccgagc

SEQ ID NO: 154 - DNA, 20 bp, Homo sapiens
  source 1..20: mol_type = genomic DNA
ggaaactggaaagacacacg

SEQ ID NO: 155 - DNA, 20 bp, Homo sapiens
  source 1..20: mol_type = genomic DNA
aaaggaagcttcagctctgg

SEQ ID NO: 156 - DNA, 20 bp, Homo sapiens
  source 1..20: mol_type = genomic DNA
tccagaaacccggcgagtga

SEQ ID NO: 157 - DNA, 22 bp, Homo sapiens
  source 1..22: mol_type = genomic DNA
ggagtcctgcttatcacaatga

SEQ ID NO: 158 - DNA, 20 bp, Homo sapiens
  source 1..20: mol_type = genomic DNA
tcctggttgaatctcctgga

SEQ ID NO: 159 - DNA, 20 bp, Homo sapiens
  source 1..20: mol_type = genomic DNA
cgttgtgatctttgccacct

SEQ ID NO: 160 - DNA, 20 bp, Homo sapiens
  source 1..20: mol_type = genomic DNA
gaaagcaaagtggacccttc

SEQ ID NO: 161 - DNA, 23 bp, Homo sapiens
  source 1..23: mol_type = genomic DNA
cataccacacaaattcaatacgg

SEQ ID NO: 162 - DNA, 21 bp, Homo sapiens
  source 1..21: mol_type = genomic DNA
ttcacagtgcaggcagctgca

SEQ ID NO: 163 - DNA, 17 bp, Homo sapiens
  source 1..17: mol_type = genomic DNA
tgtgtgctgggctctgg

SEQ ID NO: 164 - DNA, 18 bp, Homo sapiens
  source 1..18: mol_type = genomic DNA
gcaggcttttcaggcagg

SEQ ID NO: 165 - DNA, 26 bp, Homo sapiens
  source 1..26: mol_type = genomic DNA
tctgggggtccacttgtctgtaatgg

SEQ ID NO: 166 - DNA, 21 bp, Homo sapiens
  source 1..21: mol_type = genomic DNA
agtgatcctgacatgagacgg

SEQ ID NO: 167 - DNA, 20 bp, Homo sapiens
  source 1..20: mol_type = genomic DNA
tgttttactgctgccgctgc

SEQ ID NO: 168 - DNA, 25 bp, Homo sapiens
  source 1..25: mol_type = genomic DNA
tgctgaattccaaccatgagttgcc

SEQ ID NO: 169 - DNA, 19 bp, Homo sapiens
  source 1..19: mol_type = genomic DNA
aggcgttccagacgattgc

SEQ ID NO: 170 - DNA, 20 bp, Homo sapiens
  source 1..20: mol_type = genomic DNA
ctgtgctcaactctcactgc

SEQ ID NO: 171 - DNA, 20 bp, Homo sapiens
  source 1..20: mol_type = genomic DNA
accgggccaaggcctcggca

SEQ ID NO: 172 - DNA, 19 bp, Homo sapiens
  source 1..19: mol_type = genomic DNA
tttgcccagacccttcagc

SEQ ID NO: 173 - DNA, 18 bp, Homo sapiens
  source 1..18: mol_type = genomic DNA
cagctcactgcacgctgg

SEQ ID NO: 174 - DNA, 22 bp, Homo sapiens
  source 1..22: mol_type = genomic DNA
agggcagtggaggcggcacagg

SEQ ID NO: 175 - DNA, 20 bp, Homo sapiens
  source 1..20: mol_type = genomic DNA
cacacacacaggaagcacaa

SEQ ID NO: 176 - DNA, 20 bp, Homo sapiens
  source 1..20: mol_type = genomic DNA
aatgtccttccctcacaagc

SEQ ID NO: 177 - DNA, 20 bp, Homo sapiens
  source 1..20: mol_type = genomic DNA
atgagcctcgccctgtgcct

1-15. (canceled)

16. A method for the ex-vivo diagnosis of prostate cancer comprising the steps of
a) providing a sample from a patient suspected of having prostate cancer,
b) analysing the expression level of at least the nucleic acids according to:
i. SEQ ID NO: 2 and SEQ ID NO: 20 in the sample, or
ii. SEQ ID NO: 2, SEQ ID NO: 19-20 and SEQ ID NO: 35-37 in the sample, or
iii. SEQ ID NO: 1-3, SEQ ID NO: 20-34 and SEQ ID NO: 38-50 in the sample,
wherein, if the expression level of said nucleic acids is above a threshold value, the sample is designated as prostate cancer positive.

17. The method according to claim 1, wherein the sample is selected from the group comprising prostate tissue, biopsy material, lymph nodes, urine, ejaculate, blood, blood serum, blood plasma, circulating tumour cells in blood or lymph, any tissue suspected of containing metastases as well as any source that may contain prostate tumour cells or parts thereof, including vesicles like exosomes, micro vesicles, and others as well as free or protein-bound RNA molecules derived from prostate tumour cells.

18. The method according to claim 1, wherein the analysis of the expression level is performed by measuring the fluorescence of a labelled primer, labelled probe or a fluorescent detection agent, preferably the analysis of the expression level is performed by qRT-PCR.

19. The method according to claim 1, wherein the expression levels are normalized to general and prostate cell specific reference genes.

20. The method according to claim 1, wherein the general and prostate cell specific reference genes are used to evaluate sample quality, wherein the expression levels of the general and prostate cell specific reference genes are used to provide at least one quality control filter, wherein only samples which pass the at least one quality control filter are included in analysis.

21. A nucleic acid that hybridizes under stringent conditions to the nucleic acid according to claim 1.

22. The nucleic acid according to claim 8, wherein the nucleic acid is about 10 to 100 nucleotides in length.

23. The nucleic acid according to claim 8, wherein the nucleic acid comprises a detectable label.

24. Use of a nucleic acid according to claim 8 for the diagnosis of prostate cancer by the method comprising the steps of:
a) providing a sample from a patient suspected of having prostate cancer,
b) analysing the expression level of at least the nucleic acids according to:
i. SEQ ID NO: 2 and SEQ ID NO: 20 in the sample, or
ii. SEQ ID NO: 2, SEQ ID NO: 19-20 and SEQ ID NO: 35-37 in the sample, or
iii. SEQ ID NO: 1-3, SEQ ID NO: 20-34 and SEQ ID NO: 38-50 in the sample,
wherein, if the expression level of said nucleic acids is above a threshold value, the sample is designated as prostate cancer positive.

25. A kit for the diagnosis of prostate cancer comprising a nucleic acid according to claim 8 and reagents for nucleic acid amplification and/or quantification and/or detection.

26. A method for the treatment and diagnosis of prostate cancer comprising the steps of
a) analysing the expression level of the nucleic acid according to claim 1 in a sample from a patient,
b) wherein, if the expression level of said nucleic acid is above a threshold value, the sample is designated as prostate cancer positive; and
c) administering to the patient one or more Prostate Cancer Therapeutic Agents.
